(19) United States
(12) Patent Application Publication
(10) Pub. No.: US 2007/0027129 A1
(43) Pub. Date: Feb. 1, 2007

(54) Water-soluble compound

(76) Inventors: Jack A. Tuszynski, Edmonton (CA); Howard J. Greenwald, East Rochester, NY (US); Stephen H. Curry, Rochester, NY (US); Kendrick Goss, Brighton, MA (US)

Correspondence Address: BUCHANAN, INGERSOLL & ROONEY PC, POST OFFICE BOX 1404, ALEXANDRIA, VA, 22313-1404, US

(21) Appl. No.: 11/064,247

(22) Filed: Feb. 23, 2005

Related U.S. Application Data
(63) Continuation of application No. 10/923,615, filed on Aug. 20, 2004.
(63) Continuation-in-part of application No. 10/808,618, filed on Mar. 24, 2004.
(63) Continuation-in-part of application No. 10/867,517, filed on Jun. 14, 2004.
(63) Continuation-in-part of application No. 10/878,905, filed on Jun. 28, 2004.
(60) Provisional application No. 60/516,134, filed on Oct. 31, 2003.

(51) Int. Cl. A61K 31/555; C07F 15/02

(52) U.S. Cl. 514/185; 514/449; 549/510; 549/206

(57) ABSTRACT

A water-soluble magnetic anti-mitotic compound with a water-solubility of at least 100 micrograms per milliliter, a molecular weight of at least 150 grams per mole, a mitotic index factor of at least 10 percent, a positive magnetic susceptibility of at least 1,000×10⁻⁶ cgs, and a magnetic moment of at least 0.5 bohr magnetrons, wherein said compound is comprised of at least 7 carbon atoms and at least one inorganic atom with a positive magnetic susceptibility of at least 200×10⁻⁶ cgs.

### CROSS-REFERENCE TO RELATED PATENT APPLICATIONS

[0001] This application is a continuation of applicants' co-pending patent application U.S. Ser. No. 10/923,615, filed on Aug. 20, 2004 which claims priority from United States provisional patent application U.S. Ser. No. 60/516,134, filed on Oct. 31, 2003. The entire disclosure of each of these patent applications is hereby incorporated by reference into this specification.

[0002] This application is a continuation-in-part of applicants' U.S. patent application Ser. No. 10/808,618 (filed on Mar. 24, 2004), of applicants' U.S. patent application Ser. No. 10/867,517 (filed on Jun. 14, 2004), and of applicants' U.S. patent application Ser. No. 10/878,905 (filed on Jun. 28, 2004). The entire disclosure of each of these patent applications is hereby incorporated by reference into this specification.

### INCORPORATION BY REFERENCE OF MATERIAL SUBMITTED ON A COMPACT DISC

[0003] Reference is hereby made to a Sequence Listing, a Table, and/or a Computer Program Listing appendix that was submitted on compact disc. The entire content of this compact disc is hereby incorporated by reference into this specification.

### FIELD OF THE INVENTION

[0004] A water-soluble magnetic anti-mitotic compound with a water-solubility of at least 100 micrograms per milliliter, a molecular weight of at least 150 grams per mole, a mitotic index factor of at least 10 percent, a positive magnetic susceptibility of at least 1,000×10⁻⁶ cgs, and a magnetic moment of at least 0.5 bohr magnetrons, wherein said compound is comprised of at least 7 carbon atoms and at least one inorganic atom with a positive magnetic susceptibility of at least 200×10⁻⁶ cgs.

### BACKGROUND OF THE INVENTION

[0005] Paclitaxel is a complex diterpenoid that is widely used as an anti-mitotic agent; it consists of a bulky, fused ring system and an extended side chain that is required for its activity. See, e.g., page 112 of Gunda I. Georg's “Taxane Anticancer Agents: Basic Science and Current Status,” ACS Symposium Series 583 (American Chemical Society, Washington, D.C., 1995).

[0006] The aqueous solubility of paclitaxel is relatively low. Thus, as is disclosed at page 112 of such Georg text, estimates of paclitaxel solubility vary widely, ranging from about 30 micrograms per milliliter and about 7 micrograms per milliliter to less than 0.7 micrograms per milliter.

[0007] The molecular weight of paclitaxel is in excess of 700; this relatively high molecular weight is one factor that, according to the well-known “rule of 5,” contributes to paclitaxel's poor water solubility.

[0008] The “rule of 5” was set forth by Christopher A. Lipinski et al. in an article entitled “Experimental and computational approaches to estimate solubility and permeability in drug discovery and development settings,” Adv. Drug Delivery Rev., 1997, 23(1-3), 3-25. In this article, it was disclosed that: “In the USAN set we found that the sum of Ns and Os in the molecular formula was greater than 10 in 12% of the compounds. Eleven percent of compounds had a MWT of over 500 . . . . The ‘rule of 5’ states that: poor absorption of permeation is more likely where: A. There are more than 5H-bond donors (expressed as the sum of OHs and NHs); B. The MWT is over 500; C. The LogP is over 500 . . . ; D. There are more than 10H-bond acceptors (expressed as the sum of Ns and Os).”

[0009] The Lipinksi “rule of 5” has also erroneously been referred to as the “Pfizer rule of 5,” as is illustrated by U.S. Pat. No. 6,675,136, the entire disclosure of which is hereby incorporated by reference into this specification. As is disclosed in such patent, “To further illustrate the versatility of the present technique, we also introduce the concept of ‘anchor’ objects. Anchor objects are molecules situated at the corners of a region of the drug space that is defined by Pfizer's ‘rule of 5’. This rule has been empirically derived by a computer analysis of known drugs, as described by Christopher A. Pfizer and co-workers in Adv. Drug Delivery Rev., vol. 23, pp. 3-25 (1997). The “rule of 5” is focused on drug permeability and oral absorption . . . . According to Pfizer's “rule of 5”, LIPO and HBDON are between 0 and 5, HBACC is between 0 and 10, and M.W. has a maximum of 500.”

[0010] The problems that high molecular weight compounds have with poor water solubility are discussed in U.S. Pat. No. 6,667,048 of Karel J. Lambert et al., which discloses an “emulsion vehicle for a poorly soluble drug.” In the “background of the invention” section of this patent, it is disclosed that: “Hundreds of medically useful compounds are discovered every year, but clinical use of these drugs is possible only if a drug delivery vehicle is developed to transport them to their therapeutic target in the human body. This problem is prticularly critical for drugs requiring intraveneous injection in order to reach their therapeutic target or dosage but which are water insoluble or poorly water insoluble. For such hydrophobic compounds, direct injection may be impossible or highly dangerous, and can result in hemolysis, phlebitis, hypersensitivity, organ failure and/or death. Such compounds are termed by pharmacists ‘lipophilic,’ ‘hydrophobic,’ or in their most difficult form, ‘amphiphobic’ . . . . A few examples of therapeutic substances in these categories are ibuprofen, diazepam, grisefulvin, cyclosporin, cortisone, proleukin, cortisone, proleukin, etoposide and paclitaxel . . . .”

[0011] As is also disclosed in U.S. Pat. No. 6,667,048, “Administration of chemotherapuetic or anti-cancer agents is particularly problematic. Low solubility anti-cancer agents are difficult to solubulize and supply at therapeutically useful levels. On the other hand, water-soluble anti-cancer agents are generally taken up by both cancer and non-cancer cells thereby exhibiting non-specificity . . . . Efforts to improve water-solubility and comfort of administration of such agents have not solved, and may have worsened, the two fundamental problems of cancer chemotherapy: 1) non-specific toxicity, and 2) rapid clearance from the bloodstream by non-specific mechanisms. In the case of cytotoxins, which form the majority of currently available chemotherapies, these two problems are clearly related. Whenever the therapeutic is taken up by noncancerous cells, a diminished amount of the drug remains available to treat the cancer, and more importantly, the normal cell ingesting the drug is killed.”

[0012] As is also disclosed in U.S. Pat. No. 6,667,048, “The chemotherapeutic must be present throughout the affected tissue(s) at high concentration for a sustained period of time so that it may be taken up by the cancer cells, but not at so high a concentration that normal cells are injured beyond repair. Obviously, water-soluble molecules can be administered in this way, but only by slow, continuous infusion and monitoring, aspects which entail great difficulty, expense and inconvenience.”

[0013] It does not appear that the prior art has provided a water-soluble anti-mitotic agent that is capable of solving the problems discussed in U.S. Pat. No. 6,667,048. It is an object of this invention to provide such an agent. In particular, and in one embodiment, it is an object of this invention to provide a magnetic anti-mitotic composition that can be directed to be more toxic to cancer cells than normal cells. Furthermore, and in another embodiment, it is another object of this invention to provide a delivery system that will provide a chemotherapeutic agent at a high concentration for a sustained period of time but not at such a high concentration that a substantial number of normal cells are injured beyond repair.

### SUMMARY OF THE INVENTION

[0014] In accordance with one embodiment of this invention, there is provided a water-soluble magnetic anti-mitotic compound with a water-solubility of at least 100 micrograms per milliliter, a molecular weight of at least 150 grams per mole, a mitotic index factor of at least 10 percent, a positive magnetic susceptibility of at least 1,000×10⁻⁶ cgs, and a magnetic moment of at least 0.5 bohr magnetrons, wherein said compound is comprised of at least 7 carbon atoms and at least one inorganic atom with a positive magnetic susceptibility of at least 200×10⁻⁶ cgs.

[0015] In accordance with yet another embodiment of this invention, there is provided a compound with molecular weight of at least about 550, a water solubility of at least about 10 micrograms per milliliter, a pKa dissociation constant of from about 1 to about 15, and a partition coefficient of from about 1.0 to about 50.

### BRIEF DESCRIPTION OF THE DRAWINGS

[0016] The invention will be described with reference to the specification and the enclosed drawings, in which like numerals refer to like elements, and wherein:

[0017] FIG. 1 is a schematic illustration of one preferred implantable assembly of the invention;

[0018] FIG. 2 is a schematic illustration of a flow meter that may be used in conjunction with the implantable assembly of claim 1;

[0019] FIG. 3 is a flow diagram of one preferred process of the invention;

[0020] FIG. 4 is a flow diagram of another preferred process of the invention; and

[0021] FIG. 5 is a flow diagram of yet another preferred process of the invention.

### DESCRIPTION OF THE PREFERRED EMBODIMENTS

[0022] The magnetic anti-mitotic compound of this invention is particularly well-adapted to bind either to tubulin isotypes and/or microtubules comprised of such isotypes and/or various proteins that are involved in microtubule dynamics. In the first part of this specification, applicants will discuss the preparation of a database of tubulin isotopes. In the second part of this specification, applicants will discuss certain preferred, magnetic compounds that, in one embodiment, target such tubulin isotypes and/or the microtubules they make up.

A Process for Preparing a Tubulin Isotype Database

[0023] Tubulin is a component of microtubules. At the molecular level tubulin's roles are highly complex. For example, microtubules undergo cycles of rapid growth and disassembly in a process known as “dynamic instability” that appears to be critical for microtubule function. In one embodiment, the magnetic anti-mitotic compounds of this invention are capable of disrupting and/or modifying such process of “dynamic instability,” either by interacting with one or more tubulin isotypes, and/or one or more proteins involved in the dynamics of microtubule assembly and/or disassembly, and/or the microtubules themselves.

[0024] Both the alpha and the beta forms of tubulin consist of a series of isotypes, differing in amino acid sequence, each one encoded by a different gene. See, e.g., an article by Richard F. Luduena on “The multiple forms of tublin: different gene products and covalent modifications,” Int. Rev. Cytol. 178-107-275 (1998). Reference also may be had, e.g., to U.S. Pat. No. 6,306,615 (detection method for monitoring beta-tubulin isotype specific modification); the entire disclosure of this United States patent is hereby incorporated by reference into this specification.

[0025] An interesting discussion of tubulin isotypes is also presented in published United States patent application 2004/0121351, the entire disclosure of which is hereby incorporated by reference into this specification. As is disclosed in this published patent application, “Microtubules are essential to the eucaryotic cell due as they are involved in many processes and functions such as, e.g., being components of the cytoskeleton, of the centrioles and ciliums and in the formation of spindle fibres during mitosis. The constituents of microtubules are heterodimers consisting of one α-tubulin molecule and one β-tubulin molecule. These two related self-associating 50 kDa proteins are encoded by a multigen family. The various members of this multigen family are dispersed all over the human genome. Both α-tubulin and β-tubulin are most likely to originate from a common ancestor as their amino acid sequence shows a homology of up to 50%. In man there are at least 15 genes or pseudogenes for β-tubulin.”

[0026] As is also disclosed in published United States patent application 2004/0121351, “The conservation of structure and regulatory functions among the β-tubulin genes in three vertebrate species (chicken, mouse and human) allowed the identification of and categorization into six major classes of beta-tubulin polypeptide isotypes on the basis of their variable carboxyterminal ends. The specific, highly variable 15 carboxyterminal amino acids are very conserved among the various species. Beta-tubulins of categories I, II, and IV are closely related differing only 2-4% in contrast to categories III, V and VI which differ in 8-16% of amino acid positions [Sullivan K. F., 1988, Ann. Rev. Cell Biol. 4: 687-716] . . . the expression pattern is very similar between the various species as can be taken from the following table [Sullivan K. F., 1988, Ann. Rev. Cell Biol. 4: 687-716] which comprises the respective human members of each class: 1 isotype member expression pattern class I HM 40 ubiquitous class II H β 9 mostly in the brain class III H β 4 exclusively in the brain class IVa H β 5 exclusively in the brain class IVb H β 2 ubiquitous . . . . “The C terminal end of the beta-tubulins starting from amino acid 430 is regarded as highly variable between the various classes. Additionally, the members of the same class seem to be very conserved between the various species. As tubulin molecules are involved in many processes and form part of many structures in the eucaryotic cell, they are possible targets for pharmaceutically active compounds. As tubulin is more particularly the main structural component of the microtubules it may act as point of attack for anticancer drugs such as vinblastin, colchicin, estramustin and taxol which interfere with microtubule function. The mode of action is such that cytostatic agents such as the ones mentioned above, bind to the carboxyterminal end the β-tubulin which upon such binding undergoes a conformational change. For example, Kavallaris et al. [Kavallaris et al. 1997, J. Clin. Invest. 100: 1282-1293] reported a change in the expression of specific β-tubulin isotypes (class I, II, III, and IVa) in taxol resistant epithelial ovarian tumor. It was concluded that these tubulins are involved in the formation of the taxol resistence. Also a high expression of class III β-tubulins was found in some forms of lung cancer suggesting that this isotype may be used as a diagnostic marker.”

[0027] The function of certain tubulins in Taxol resistance was also discussed in U.S. Pat. No. 6,362,321, the entire disclosure of which is hereby incorporated by reference into this specification. As is disclosed in this patent, “Taxol is a natural product derived from the bark of Taxus brevafolio (Pacific yew). Taxol inhibits microtubule depolymerization during mitosis and results in subsequent cell death. Taxol displays a broad spectrum of tumorcidal activity including against breast, ovary and lung cancer (McGuire et al., 1996, N. Engid. J. Med. 334:1-6; and Johnson et al., 1996, J. Clin. Ocol. 14:2054-2060). While taxol is often effective in treatment of these malignancies, it is usually not curative because of eventual development of taxol resistance. Cellular resistance to taxol may include mechanisms such as enhanced expression of P-glycoprotein and alterations in tubulin structure through gene mutations in the β chain or changes in the ratio of tubulin isomers within the polymerized microtubule (Wahl et al., 1996, Nature Medicine 2:72-79; Horwitz et al., 1993, Natl. Cancer Inst. 15:55-61; Haber et al., 1995, J. Biol. Chem. 270:31269-31275; and Giannakakou et al., 1997, J. Biol. Chem. 272:17118-17125) . . . ” In one embodiment of this invention, the magnetetic anti-mitotic compound of this invention is used in conjunction with paclitaxel to provide an improved anti-cancer composition. Without wishing to be bound to any particular theory, applicants believe that their anti-mitotic compound targets a tubulin isotype that is responsible for the drug resistance to paclitaxel.

[0028] The increased presence of certain tubulin isotypes associated with certain types of cancers was noted in an article by Tien Yeh et al., “The B_{II} Isotype of Tubulin is Present in the Cell Nuclei of a Variety of Cancers,” Cell Motility and the Cytoskeleton 57:96-106 (2004). Constructs of these B_{II} isotypes and applicants' magnetic anti-mitotic compound comprise one embodiment of the present invention.

[0029] The Yeh et al. article discloses that both alpha-tubulin and beta-tubulin consist of a series of isotypes differieng in amino acid sequence, each one encoded by a different gene; and it refers to a 1998 article by Richard F. Luduena entitled “The multiple forms of tubulin: different gene products and covalent modifications,” Int. Rev. Cytol 178:207-275. The Yeh et al. article also disclosed that the B_{II} Isotype of tubulin is present in the nuclei of many tumors, stating that “Three quarters (75%) of the tumors we examined contained nuclear the B_{II} (Table I).” The authors of the Yeh et al. article suggest that (at page 104) “ . . . it would be interesting to explore the possibility of using nuclear B_{II} as a chemotherapeutic target.”

[0030] It thus appears that many isotypes of tubulin might be “chemotherapeutic targets” such as, e.g., the “nuclear B_{II}” disclosed in the Yeh et al. article, or the “ . . . specific β-tubulin isotypes (class I, II, III, and IVa) . . . ” described in the Kavallaris et al. article (Kavallaris et al. 1997, J. Clin. Invest. 100: 1282-1293) and discussed in published United States patent application 2004/0121351. It also appears that many isotypes of tubulin are “ . . . targets for pharmaceutically active compounds . . . .” The process of this invention may be used to identify these tubulin isotype targets, to model such targets, and to determine what therapeutic agents interact with such targets; and it may also be used to assist in the construction of anti-mitotic agents bound to such isotypes.

[0031] As is discussed in published United States patent application US2002/0106705 (the entire disclosure of which is hereby incorporated by reference into this specification), the therapeutic agent that interacts with the tubulin isotype target may be, e.g., a “β-tubulin modifying agent.” One such agent is described in US2002/0106705 as being “ . . . an agent that has the ability to specifically react with an amino acid residue of β-tubulin, preferably a cysteine, more preferably the cysteine residue at position 239 of a β-tubulin isotype such as β1- β2- or β4-tubulin and antigenic fragments thereof comprising the residue, preferably cysteine 239. The β-tubulin modifying agent of the invention can be, e.g., any sulfhydryl or disulfide modifying agent known to those of skill in the art that has the ability to react with the sulfur group on a cysteine residue, preferably cysteine residue 239 of β-tubulin isotype. Preferably, the β-tubulin modifying agents are substituted benzene compounds, pentafluorobenzenesulfonamides, arylsulfonanilide phosphates, and derivatives, analogs, and substituted compounds thereof (see, e.g., U.S. Pat. No. 5,880,151; PCT 97/02926; PCT 97/12720; PCT 98/16781; PCT 99/13759; and PCT 99/16032, herein incorporated by reference; see also Pierce Catalogue, 1999/2000, and Means, Chemical Modification of Proteins). In one embodiment, the agent is 2-fluoro-1-methoxy-4-pentafluorophenylsulfonamidobenzene (compound 1; FIG. 1C). Modification of a β-tubulin isotype at an amino acid residue, e.g., cysteine 239, by an agent can be tested by treating a α-tubulin peptide, described herein, with the putative agent, followed by, e.g., elemental analysis for a halogen, e.g., fluorine, reverse phase HPLC, NMR, or sequencing and HPLC mass spectrometry. Optionally compound 1 described herein can be used as a positive control. Similarly, an α-tubulin modifying agent refers to an agent having the ability to specifically modify an amino acid residue of an α-tubulin.” In one embodiment of this invention, prior art beta-tubulin targeting agents are modified by making them water-soluble and/or magnetic in accordance with the process of this invention.

Identification of the Tubulin Isotype Targets

[0032] The tubulin isotypes that are potential chemotherapeutic targets are preferably those isotypes that are present in a higher concentration in diseased biological organisms than in normal biological organisms. They may be identified by, e.g., standard analytical techniques.

[0033] By way of illustration, and not limitation, an analysis may be done regarding the extent to which, if any, a beta-tubulin isotype, e.g., is present in tumors. As is described in the Yeh et al. paper cited elsewhere in this specification, one may study a variety of tumors by “standard immunohistochemical techniques” to determine the extent to which one or more tubulin isotypes if present in the tumors. Yeh et al. state that: “Tumors were randomly selected from the San Antonio Cancer Institute Tumor Bank to represent a variety of tumor types, grades, and stages. Benign tissues adjacent to the tumor were examined when possible. In addition to malignant tumors, selected benign lesions, such as meningiomas, and tumors of low malignant potential, such as giant cell tumors of bone, were also examined. All tissues were formalin-fixed and paraffin-embedded . . . . Standard immunohistochemical techniques were utilized [Hsu et al., 1981]. The monoclonal antibody to the (BII isotype of tubulin (JDR.3B8) was at an initial concentration of 2 mg/mL and diluted 1:2,000, for a final concentration of 1 μg/mL. No antigen retrieval step was used because the antigen was easily accessible for immunohistochemical staining. Slides were incubated at room temperature with the primary antibody for 1 h. The sections were then exposed to a secondary biotinylated rabbit anti-mouse antibody (DAKO, cat no. E354, 1:100), then Streptavidin horseradish peroxidase was applied, followed by diaminobenzidine and OsO₄. Slides were counter-stained with methyl green. A positive skin control and negative controls (minus antibody) were run with each batch of tumors . . . . Slides were visualized using an Olympus BX-40 microscope, equipped with PlanFluorite objectives. The pattern and location of cells staining with the antibody to B11-tubulin were recorded. Intensity and proportion of cells stained were recorded in a semi-quantitative manner, as previously described [Allred et al., 1998] . . . .”

Preparation of a Database of Tubulin Isotypes

[0034] In one embodiment of the process of this invention, a database of tubulin isotypes is prepared. In this section of the specification, excerpts from a paper that was prepared by one of the applicants is presented. The paper in question is entitled “Homology Modeling of Tubulin Isotypes and its Consequences for the Biophysical Properties of Tubulin and Microtubules.” One of the authors of this paper is applicant Jack A. Tuszynski; and such paper will hereinafter be referred to as the “Tuszynski paper.”

[0035] As is disclosed in the introductory portion of the Tuszynski et al. paper, “Microtubules, cylindrical organelles found in all eukaryotes, are critically involved in a variety of cellular processes including motility, transport and mitosis.” As authority for this proposition, the paper cites a text by J. S. Hymans et al. entitled “Microtubules” (Wiley-Liss, New York, N.Y., 1994).

[0036] The Tuszynski paper also discloses that: “Their component protein, tubulin, is composed of two polypeptides of related sequence, designated α and β. In addition to α- and β-tubulin, many microtubules in cells require the related γ-tubulin for nucleation.” As authority for this proposition, there are cited articles by H. P. Erickson (“γ-tubulin nucleation, template or protofilament?,” Nature Cell Biology 2:E93-E96, 200) and by R. F. Luduena (“The multiple forms of tubulin: different gene products and covalent modifications,” Int. Rev. Cytol. 178:207-275, 1998).

[0037] The Tuszynski paper also discloses that: “Two other tubulins, designated δ and ε, are widespread, . . . although their roles are still uncertain . . . models utilizing them have been proposed.” As authority for this statement, the paper cites works by S. T. Vaughan et al. (“New tubulins in protozoal parasites,” Curr. Biol. 10:R258-R259, 2000) and Y. F. Inclan et al. (“Structural models for the self-assembly and microtubule interactions of . . . tubulin,” Journal of Cell Science 114:413-422, 2001).

[0038] The Tuszynski paper also discloses that: “At least three of these tubulins, namely, α, β, and γ, exist in many organisms as families of closely related isotypes. An enigmatic feature of tubulin is its heterogeneity. Not only can α and β-tubulin exist as multiple isotypes in many organisms, but the protein can also undergo various post-translational modifications, such as phosphorylation, acetylation, detyrosination, and polyglutamylation.” As authority for this statement, the paper cites a work by A. Banergee, “Coordination of posttranslational modifications of bovine brain. α tubulin, polyglycylation of delta2 tubulin,” Journal of Biological Chemistry 277:46140-46144, 2002).

[0039] The Tuszynski paper also discloses that “At the molecular level tubulin's roles are highly complex and are related to the structural variations observed.” As authority for this proposition, the article cites a work by K. L. Richards et al., “Structure-function relationships in yeast tubulins,” Molecular Biology of the Cell 11:1887-1903, 2000.

[0040] The Tuszynski paper also states that “ . . . microtubules undergo cycles of rapid growth and disassembly in a process known as dynamic instability that appears to be critical for microtubule function, especially in mitosis. A guanosine triphosphate (GTP) tubulin hydrolyzes bound GTP to GDP; the kinetics of this process in beta-tubulin is critical in regulating dynamic instability by affecting the loss of a so-called ‘cap’ that stabilizes the microtubule structure.” As authority for this statement, the article cites a work by T. J. Mitchison et al., “Dynamic instability of microtubule growth,” Nature 312:237-242, 1984.

[0041] The Tuszynski paper also discloses that “In addition to forming microtubules, tubulin interacts with a large number of associated proteins. Some of these, such as tektin, may play structural roles; others, the so-called microtubule-associated proteins (MAPs) such as tau or MAP2, may stabilize the microtubules, stimulate microtubule assembly and mediate interactions with other proteins. Still others, such as kinesin and dynein, are motor proteins that move cargoes, e.g., vesicles, along microtubules.” As authority for these statements, the article refers to works by M. Kikkawa et al. (“Switch-based mechanisms of kinesin motors,” Nature 411:439-445, 2001) and Z. Wang et al. (“The C-terminus of tubulin increases cytoplasmic dynein and kinesin processity,” Biophysical Journal 78:1955-1964, 2000).

[0042] As is also disclosed in the Tuszynski et al. paper, “The precise molecular basis of the properties of tubulin is still not well understood, in part because tubulin's highly flexible conformation . . . makes it difficult to crystallize this region.” As authority for this statement, the article cites a work by O. Keskin et al., “Relating molecular flexibility to function: a case study of tubulin,” Biphysical Journal 83:663-680, 2002.

[0043] The Tuszynski paper also discloses that: “In a major advance in the field, the three-dimensional structure of bovine brain tubulin has been determined by electron crystallography resulting in atomic structures available in the The Protein Data Bank (Berman et al. [2000] as entries 1TUB Nogales et al. (1998) and 1JFF Lowe et al. (2000).” The Berman et al. reference is to an article by H. M. Berman et al. on “The protein data bank,” Nucleic Acids Research 28:235-242, 2000. The Nogales et al. reference was to an article by E. Nogales et al. on the “Structure of the alpha/beta tubulin dimer by electron crystallography,” Nature 393: 199-203, 1998. The Lowe et al. reference is to an article by J. Lowe et al. on the “Refined structure of alpha/beta-tubulin at 3.5 angstrom resolution,” Journal of Molecular Biology 313:1045-1057 (2001).

[0044] The Tuszynski paper also discloses that “Once the three dimensional structure of a protein is known it is possible to use homology modeling to predict the structures of related forms of the protein with some degree of accuracy. We have applied these techniques to a series of 300 different tubulins, representing α- and β-tubulins from animals, plants, fungi and protists, as well as several γ-, δ- and ε-tubulins.” It should be noted that such “homology modeling” is frequently referred to in the patent literature. Reference may be had, e.g., to U.S. Pat. Nos. 5,316,935; 5,486,802; 5,686,255; 5,738,998; 6,027,720; 6,080,549; 6,197,589; 6,356,845; 6,433,158; 6,451,986; 6,468,770; 6,548,477; 6,654,644; 6,654,667; 6,627,746; and the like. The entire disclosure of each of these United States patents is hereby incorporated by reference into this specification.

[0045] The Tuszynski paper also discloses that: “For all of the resulting tubulin structures, we have been able to estimate the magnitudes and orientations of their dipole moments, charge distributions and surface to volume ratios. The magnitudes and orientations of the tubulin dimers' dipose moments appear to play significant roles in microtubule assembly and stability.”

[0046] The Tuszynski paper also discloses that “In addition, we have been able to generate plausible conformations for the C-terminal regions. Notably, the C-termini of alpha- and beta-tubulin were not resolved in the original crystallographic structures of tubulin due to their flexibility and possibly sample inhomgeneity.” As support for this statement, the article cited a work by E. Nogales et al., “Structure of the alpha/beta tubulin dimmer by electron crystallography,” Nature 393:199-203, 1998.

[0047] The Tuszynski paper also discloses that “The importance of these regions is highlighted by the fact that they are the site of most of tubulin's post-translational modifications, that they bind to MAPs and that differences among tubulin isotypes cluster here.”

[0048] The Tuszynski paper discusses the materials and methods used to construct the tublin isotype database. In one embodiment of the process used in the Tuszynksi paper, the “ . . . abundance of various homologous isotypes of tubulin, called alpha and beta (with additional indices labeling the isotypes) is correlated with the specific locations of the cells in which they are found. We have used the known amino-acid sequences in which the isotypes differ, in connection with the data of the Downing group for the known three-dimensional structure obtained by electron crystallography of bovine brain tubulin by Nogales et al., and applied these in molecular dynamics simulations in order to study the resulting differences in the biophysical and biochemical properties such as: volume, surface are, electric field distributions, binding sites, conformational changes, etc. Our structural experiments on purified abII, abIII and abIV tubulin dimers have produced strong evidence that their conformations differ. Using the Molecular Simulation International (MSI) Homology Software Module, we have constructed three-dimensional models of the abI, abII, abIII, abIV, abV, abVI and abVII dimers. This Downing structure was fitted to the amino acid sequences for porcine brain a- and b-tubulin, which, for the beta subunit, is largely bII. To generate models of the various dimers, the Homology software module is used to align the sequences of the various isotypes to the sequence of the Nogales et al structure, and the coordinates of the Nogales structure are mapped to the aligned beta isotype. Then energy minimization and molecular dynamic simulation is being used on the approximate result to refine a structural model of each of these dimers. Similar homology modeling approaches have been used to predict the structure of one protein from that of a closely related protein; such models have also been extensively used to design useful drugs. In constructing computational 3D models from all of the available sequences of tubulin isotypes we have exploited the high degree of sequence and structure conservation that is observed within tubulin isotypes and between the alpha and beta subunits by using software such as the experimental Modeller and tubulin crystallographic data as structural templates to produce 3D models containing chosen amino acid sequences.”

[0049] In one embodiment of the Tuszynski process, the “Swiss-Prot database” was referred to. As is also disclosed in the Tuszynski paper, “As an initial step the Swiss-Prot database Release 40.2 of 8 Nov. 2002 . . . (available at http://www.expasy.org/sprot/) was searched for tubulin amino acid sequences.” The article referred to a work by B. Boekmann et al. (“The SWISS-PROT protein knowledge base and its supplement TrEMBL,” Nucl. Acids. Res. 31:365-370, 2003) for a reference relating to such “Swiss-Prot database.” It should be noted that many United States patents refer to such Swiss-Prot database. Reference may be had, e.g., to U.S. Pat. Nos. 6,183,968; 6,207,397; 6,303,319; 6,372,897; 6,373,971 (method and apparatus for pattern discovery in protein sequences); U.S. Pat. Nos. 6,387,641; 6,631,322 (methods for using functional site descriptors and predicting protein function), U.S. Pat. No. 6,466,874 (Rosetta stone method for detecting protein function and protein-protein interactions from genome sequences), U.S. Pat. No. 6,470,277 (techniques for facilitating identification of candidate genes), U.S. Pat. No. 6,564,151 (assigning protein functions by comparative genome analysis protein phylogenetic profiles), and the like. The entire disclosure of each of these United States patents is hereby incorporated by reference into this specification.

[0050] Referring again to the Tuszynksi paper, it is disclosed that: “A search using the keyword ‘tubulin’ was manually filtered to separate actual tubulin sequences from those of other tubulin related proteins. This provided some 290 sequences, representing a wide range of species. Of these 27 are annotated as being fragmentary, leaving 263 complete tubulin monomer sequences. Of particular interest were the 15 human sequences obtained . . . .”

[0051] Referring again to the Tuszynksi paper, it is disclosed that: “Table 1 summarizes all of the tubulin sequences used in this study for quick reference and convenience. The table names the source organism, and for each . . . gives the name used in the databank. It is important to relate the biochemical data encapsulated by the amino acid sequence to the biologically relevant information presented in Table 1 in the form of the organism from which a given tubulin is derived.”

[0052] In referring to such “Table 1,” the Tuszynski paper states that: “Table 1. Tubulin sequences used in this study. The table names the source organism, and for each . . . gives the name used in the databank.”

| | | |
|---|---|---|
| File Name | Name of Organism | SEQ. NO. |

| | | |
|---|---|---|
| TBA1_ANEPH | Anemia phyllitidis | SEQ ID NO. 1 |
| TBA1_ARATH | Arabidopsis thaliana | SEQ ID NO. 2 |
| TBA1_CHICK | Gallus gallus | SEQ ID NO. 3 |
| TBA1_CHLRE | Chlamydomonas reinhardtii | SEQ ID NO. 4 |
| TBA1_DROME | Drosophila melanogaster | SEQ ID NO. 5 |
| TBA1_ELEIN | Eleusine indica | SEQ ID NO. 6 |
| TBA1_EMENI | Emericella nidulans | SEQ ID NO. 7 |
| TBA1_ENTHI | Entamoeba histolytica | SEQ ID NO. 8 |
| TBA1_HOMAM | Homarus americanus | SEQ ID NO. 9 |
| TBA1_HORVU | Hordeum vulgare | SEQ ID NO. 10 |
| TBA1_HUMAN | Homo sapiens | SEQ ID NO. 11 |
| TBA1_MAIZE | Zea mays | SEQ ID NO. 12 |
| TBA1_MOUSE | Mus musculus | SEQ ID NO. 13 |
| TBA1_NEUCR | Neurospora crassa | SEQ ID NO. 14 |
| TBA1_ORYSA | Oryza sativa | SEQ ID NO. 15 |
| TBA1_PARLI | Paracentrotus lividus | SEQ ID NO. 16 |
| TBA1_PEA | Pisum sativus | SEQ ID NO. 17 |
| TBA1_PELFA | Pelvetia fastigiata | SEQ ID NO. 18 |
| TBA1_PNECA | Pneumocystis carinii | SEQ ID NO. 19 |
| TBA1_SCHPO | Schizosaccharomyces pombe | SEQ ID NO. 20 |
| TBA1_STYLE | Stylonichia lemnae | SEQ ID NO. 21 |
| TBA1_VOLCA | Volvox carteri | SEQ ID NO. 22 |
| TBA1_YEAST | Saccharomyces cerevisiae | SEQ ID NO. 23 |
| TBA2_ANEPH | Anemia phyllitidis | SEQ ID NO. 24 |
| TBA2_ARATH | Arabidopsis thaliana | SEQ ID NO. 25 |
| TBA2_CAEEL | Caenorhabditis elegans | SEQ ID NO. 26 |
| TBA2_CHICK | Gallus gallus | SEQ ID NO. 27 |
| TBA2_CHLRE | Chlamydomonas reinhardtii | SEQ ID NO. 28 |
| TBA2_DROME | Drosophila melanogaster | SEQ ID NO. 29 |
| TBA2_ELEIN | Eleusine indica | SEQ ID NO. 30 |
| TBA2_EM EN I | Emericella nidulans | SEQ ID NO. 31 |
| TBA2_HOMAM | Homarus americanus | SEQ ID NO. 32 |
| TBA2_HORVU | Hordeum vulgare | SEQ ID NO. 33 |
| TBA2_HUMAN | Homo sapiens | SEQ ID NO. 34 |
| TBA2_MAIZE | Zea mays | SEQ ID NO. 35 |
| TBA2_MOUSE | Mus musculus | SEQ ID NO. 36 |
| TBA2_NEUCR | Neurospora crassa | SEQ ID NO. 37 |
| TBA2PATVU | Patella vulgata | SEQ ID NO. 38 |
| TBA2_PELFA | Pelvetia fastigiata | SEQ ID NO. 39 |
| TBA2_SCHPO | Schizosaccharomyces pombe | SEQ ID NO. 40 |
| TBA2_STYLE | Stylonichia lemnae | SEQ ID NO. 41 |
| TBA3_ARATH | Arabidopsis thaliana | SEQ ID NO. 42 |
| TBA3_CHICK | Gallus gallus | SEQ ID NO. 43 |
| TBA3_DROME | Drosophila melanogaster | SEQ ID NO. 44 |
| TBA3_ELEIN | Eleusine indica | SEQ ID NO. 45 |
| TBA3_HOMAM | Homarus americanus | SEQ ID NO. 46 |
| TBA3_HORVU | Hordeum vulgare | SEQ ID NO. 47 |
| TBA3_MAIZE | Zea mays | SEQ ID NO. 48 |
| TBA3_MOUS E | Mus musculus | SEQ ID NO. 49 |
| TBA3_YEAST | Saccharomyces cerevisiae | SEQ ID NO. 50 |
| TBA4_CHICK | Gallus gallus | SEQ ID NO. 51 |
| TBA4_DROME | Drosophila melanogaster | SEQ ID NO. 52 |
| TBA4_HUMAN | Homo sapiens | SEQ ID NO. 53 |
| TBA4_MAIZE | Zea mays | SEQ ID NO. 54 |
| TBA5_CHICK | Gallus gallus | SEQ ID NO. 55 |
| TBA5_MAIZE | Zea mays | SEQ ID NO. 56 |
| TBA6_ARATH | Arabidopsis thaliana | SEQ ID NO. 57 |
| TBA6_HUMAN | Homo sapiens | SEQ ID NO. 58 |
| TBA6_MAIZE | Zea mays | SEQ ID NO. 59 |
| TBA6_MOUS E | Mus musculus | SEQ ID NO. 60 |
| TBA8_CAEEL | Caenorhabditis elegans | SEQ ID NO. 61 |
| TBA8_CHICK | Gallus gallus | SEQ ID NO. 62 |
| TBA8_HUMAN | Homo sapiens | SEQ ID NO. 63 |
| TBA8_MOUS E | Mus musculus | SEQ ID NO. 64 |
| TBA_AJECA | Ajellomyces capsulatum | SEQ ID NO. 65 |
| TBAA_PN ECA | Pneumocystis carinii | SEQ ID NO. 66 |
| TBAA_SCHCO | Schizophyllum commune | SEQ ID NO. 67 |
| TBA_AVESA | Avena sativa | SEQ ID NO. 68 |
| TBA_BLEJA | Blephansma japonicus | SEQ ID NO. 69 |
| TBA_BOMMO | Bombyx mori | SEQ ID NO. 70 |
| TBAB_SCHCO | Schizophyllum commune | SEQ ID NO. 71 |
| TBA_CANAL | Candida albicans | SEQ ID NO. 72 |
| TBA_CHLVU | Chlorella vulgaris | SEQ ID NO. 73 |
| TBA_DICDI | Dictyostelium discoideum | SEQ ID NO. 74 |
| TBAD_PHYPO | Physarum polycephalum | SEQ ID NO. 75 |
| TBAE_PHYPO | Physarum polycephalum | SEQ ID NO. 76 |
| TBA_EUGGR | Euglena gracilis | SEQ ID NO. 77 |
| TBA_EU POC | Euplotes octocarinatus | SEQ ID NO. 78 |
| TBA_EU PVA | Euplotes vannus | SEQ ID NO. 79 |
| TBA_HAECO | Haemonchus contortus | SEQ ID NO. 80 |
| TBA_LEPSE | Leptomonas seymouri | SEQ ID NO. 81 |
| TBA_LYTPI | Lytechinus pictus | SEQ ID NO. 82 |
| TBA_MYCGR | Mycosphaerella graminicola | SEQ ID NO. 83 |
| TBA_NAEGR | Naegleria gruberi | SEQ ID NO. 84 |
| TBA_NOTVI | Notophtalamus viridescens | SEQ ID NO. 85 |
| TBAN_PHYPO | Physarum polycephalum | SEQ ID NO. 86 |
| TBA_OCTDO | Octopus Dofleini | SEQ ID NO. 87 |
| TBA_OCTVU | Lytechinus pictus | SEQ ID NO. 88 |
| TBA_ONCKE | Onchorhynchus keta | SEQ ID NO. 89 |
| TBA_OXYGR | Oxytricha granulifera | SEQ ID NO. 90 |
| TBA_PICAB | Picia abies | SEQ ID NO. 91 |
| TBA_PIG | Sus scrofa | SEQ ID NO. 92 |
| TBA_PLAFK | Plasmodium falciparum | SEQ ID NO. 93 |
| TBA_PLAYO | Plasmodium berghei yoelii | SEQ ID NO. 94 |
| TBA_PRUDU | Prunus dulcis | SEQ ID NO. 95 |
| TBA_SORMA | Sordaria macrospora | SEQ ID NO. 96 |
| TBA_TETPY | Tetrahymena pynformis | SEQ ID NO. 97 |
| TBA_TETTH | Tetrahymena thermophila | SEQ ID NO. 98 |
| TBAT_ONCMY | Onchorhynchus mykiss | SEQ ID NO. 99 |
| TBA_TO R MA | Torpedo marmorata | SEQ ID NO. 100 |
| TBA_TOXGO | Taxoplasma gondii | SEQ ID NO. 101 |
| TBA_TRYBR | Trypanosoma brucei | SEQ ID NO. 102 |
| TBA_TRYCR | Trypanosoma cruzi | SEQ ID NO. 103 |
| TBA_WHEAT | Triticum aestivum | SEQ ID NO. 104 |
| TBA_XEN LA | Xenopus laevis | SEQ ID NO. 105 |
| TBB1_ANEPH | Anemia phyllitidis | SEQ ID NO. 106 |
| TBB1_ARATH | Arabidopsis thaliana | SEQ ID NO. 107 |
| TBB1_AVESA | Avena sativa | SEQ ID NO. 108 |
| TBB1_BRUPA | Brugia pahangi | SEQ ID NO. 109 |
| TBB1_CHICK | Gallus gallus | SEQ ID NO. 110 |
| TBB1_CHOCR | Chondrus crispus | SEQ ID NO. 111 |
| TBB1_COLGL | Glomerella cingulata | SEQ ID NO. 112 |
| TBB1_COLGR | Glomerella graminicola | SEQ ID NO. 113 |
| TBB1_CYAPA | Cyanaphora paradoxa | SEQ ID NO. 114 |
| TBB1_DAUCA | Daucus carota | SEQ ID NO. 115 |
| TBB1_ELEIN | Eleusine indica | SEQ ID NO. 116 |
| TBB1_EMENI | Emericella nidulans | SEQ ID NO. 117 |
| TBB1_GADMO | Gadus morhua | SEQ ID NO. 118 |
| TBB1_GEOCN | Galactomyces geotrichum | SEQ ID NO. 119 |
| TBB1_HOMAM | Homarus americanus | SEQ ID NO. 120 |
| TBB1_HU MAN | Homo sapiens | SEQ ID NO. 121 |
| TBB1_LU PAL | Lupinus albus | SEQ ID NO. 122 |
| TBB1_MAIZE | Zea mays | SEQ ID NO. 123 |
| TBB1_MANSE | Manduca sexta | SEQ ID NO. 124 |
| TBB1_NOTCO | Notothenia coriiceps | SEQ ID NO. 125 |
| TBB1_ORYSA | Oryza sativa | SEQ ID NO. 126 |
| TBB1_PARTE | Paramecium tetraurelia | SEQ ID NO. 127 |
| TBB1_PEA | Pisum sativus | SEQ ID NO. 128 |
| TBB1_PHYPO | Physarum polycephalum | SEQ ID NO. 129 |
| TBB1_PORPU | Porphyra purpura | SEQ ID NO. 130 |
| TBB1_RAT | Rattus norvegicus | SEQ ID NO. 131 |
| TBB1_SOLTU | Solanum tuberosum | SEQ ID NO. 132 |
| TBB1_SOYBN | Glycine max | SEQ ID NO. 133 |
| TBB1_TRIVI | Trichoderma viride | SEQ ID NO. 134 |
| TBB1_VOLCA | Volvox carteri | SEQ ID NO. 135 |
| TBB1_WHEAT | Triticum aestivum | SEQ ID NO. 136 |
| TBB2_ANEPH | Anemia phyllitidis | SEQ ID NO. 137 |
| TBB2_ARATH | Arabidopsis thaliana | SEQ ID NO. 138 |
| TBB2_CAEEL | Caenorhabditis elegans | SEQ ID NO. 139 |
| TBB2_CHICK | Gallus gallus | SEQ ID NO. 140 |
| TBB2_COLGL | Glomerella cingulata | SEQ ID NO. 141 |
| TBB2_COLG R | Glomerella graminicola | SEQ ID NO. 142 |
| TBB2DAUCA | Daucus carota | SEQ ID NO. 143 |
| TBB2_DROER | Drosophila erecta | SEQ ID NO. 144 |
| TBB2_DROM E | Drosophila melanogaster | SEQ ID NO. 145 |
| TBB2_ELEIN | Eleusine indica | SEQ ID NO. 146 |
| TBB2_EMENI | Emericella nidulans | SEQ ID NO. 147 |
| TBB2_ERYPI | Erysiphe pisi | SEQ ID NO. 148 |
| TBB2_G EOCN | Galactomyces geotrichum | SEQ ID NO. 149 |
| TBB2_HOMAM | Homarus americanus | SEQ ID NO. 150 |
| TBB2_HUMAN | Homo sapiens | SEQ ID NO. 151 |
| TBB2_LUPAL | Solanum tuberosum | SEQ ID NO. 152 |
| TBB2_MAIZE | Zea mays | SEQ ID NO. 153 |
| TBB2_ORYSA | Oryza sativa | SEQ ID NO. 154 |
| TBB2_PEA | Pisum sativus | SEQ ID NO. 155 |
| TBB2_PHYPO | Physarum polycephalum | SEQ ID NO. 156 |
| TBB2_PORPU | Porphyra purpura | SEQ ID NO. 157 |
| TBB2_SOLTU | Solanum tuberosum | SEQ ID NO. 158 |
| TBB2_SOYBN | Glycine max | SEQ ID NO. 159 |
| TBB2_TRIVI | Trichoderma viride | SEQ ID NO. 160 |
| TBB2_WH EAT | Triticum aestivum | SEQ ID NO. 161 |
| TBB2_XENLA | Xenopus laevis | SEQ ID NO. 162 |
| TBB3_ANEPH | Anemia phyllitidis | SEQ ID NO. 163 |
| TBB3_CHICK | Gallus gallus | SEQ ID NO. 164 |
| TBB3_D ROME | Drosophila melanogaster | SEQ ID NO. 165 |
| TBB3_ELEIN | Eleusine indica | SEQ ID NO. 166 |
| TBB3_MAIZE | Zea mays | SEQ ID NO. 167 |
| TBB3_ORYSA | Oryza sativa | SEQ ID NO. 168 |
| TBB3_PEA | Pisum sativus | SEQ ID NO. 169 |
| TBB3_PORPU | Porphyra purpura | SEQ ID NO. 170 |
| TBB3_SOYBN | Glycine max | SEQ ID NO. 171 |
| TBB3_WHEAT | Triticum aestivum | SEQ ID NO. 172 |
| TBB4_ARATH | Arabidopsis thaliana | SEQ ID NO. 173 |
| TBB4_CAEEL | Caenorhabditis elegans | SEQ ID NO. 174 |
| TBB4_CHICK | Gallus gallus | SEQ ID NO. 175 |
| TBB4_ELEI N | Eleusine indica | SEQ ID NO. 176 |
| TBB4_HUMAN | Homo sapiens | SEQ ID NO. 177 |
| TBB4_MAIZE | Zea mays | SEQ ID NO. 178 |
| TBB4_PORPU | Porphyra purpura | SEQ ID NO. 179 |
| TBB4_W H EAT | Triticum aestivum | SEQ ID NO. 180 |
| TBB4_XENLA | Xenopus laevis | SEQ ID NO. 181 |
| TBB5_ARATH | Arabidopsis thaliana | SEQ ID NO. 182 |
| TBB5_CHICK | Gallus gallus | SEQ ID NO. 183 |
| TBB5_ECTVR | Ectocarpus variabilis | SEQ ID NO. 184 |
| TBB5_HUMAN | Homo sapiens | SEQ ID NO. 185 |
| TBB5_MAIZE | Zea mays | SEQ ID NO. 186 |
| TBB5_WHEAT | Triticum aestivum | SEQ ID NO. 187 |
| TBB6_ARATH | Arabidopsis thaliana | SEQ ID NO. 188 |
| TBB6_CHICK | Gallus gallus | SEQ ID NO. 189 |
| TBB6_ECTVR | Ectocarpus variabilis | SEQ ID NO. 190 |
| TBB6_MAIZE | Zea mays | SEQ ID NO. 191 |
| TBB7_ARATH | Arabidopsis thaliana | SEQ ID NO. 192 |
| TBB7_CAEBR | Caenorhabditis briggsae | SEQ ID NO. 193 |
| TBB7_CAEEL | Caenorhabditis elegans | SEQ ID NO. 194 |
| TBB7_CHICK | Gallus gallus | SEQ ID NO. 195 |
| TBB7_MAIZE | Zea mays | SEQ ID NO. 196 |
| TBB8_ARATH | Arabidopsis thaliana | SEQ ID NO. 197 |
| TBB8_MAIZE | Zea mays | SEQ ID NO. 198 |
| TBB9_ARATH | Arabidopsis thaliana | SEQ ID NO. 199 |
| TBB_ACHKL | Achlya klebsiana | SEQ ID NO. 200 |
| TBB_ACRCO | Neotyphodium coenophialum | SEQ ID NO. 201 |
| TBB_AJECA | Ajellomyces capsulatum | SEQ ID NO. 202 |
| TBB_ASPFL | Aspergillus flavus | SEQ ID NO. 203 |
| TBB_ASPPA | Aspergillus parasiticus | SEQ ID NO. 204 |
| TBB_BABBO | Babesia bovis | SEQ ID NO. 205 |
| TBB_BOMMO | Bombyx mori | SEQ ID NO. 206 |
| TBB_BOTCI | Botryotinia fuckeliana | SEQ ID NO. 207 |
| TBB_CANAL | Candida albicans | SEQ ID NO. 208 |
| TBB_CEPAC | Acremonium chrysogenum | SEQ ID NO. 209 |
| TBB_CHLIN | Chlamydomonas incerta | SEQ ID NO. 210 |
| | reinhardtii | |
| TBB_CHLRE | Chlamydomonas reinhardtii | SEQ ID NO. 211 |
| TBB_CICAR | Cicer arietinum | SEQ ID NO. 212 |
| TBB_DICDI | Dictyostelium discoideum | SEQ ID NO. 213 |
| TBB_EIMTE | Eimeria tenella | SEQ ID NO. 214 |
| TBB_EPITY | Epichloe typhina | SEQ ID NO. 215 |
| TBB_ERYGR | Blumenia graminis | SEQ ID NO. 216 |
| TBB_EUGGR | Euglena gracilis | SEQ ID NO. 217 |
| TBB_EUPCR | Monoeuplotes crassus | SEQ ID NO. 218 |
| TBB_EUPFO | Euplotes focardii | SEQ ID NO. 219 |
| TBB_EUPOC | Euplotes octocarinatus | SEQ ID NO. 220 |
| TBB_GIALA | Giardia intestinalis | SEQ ID NO. 221 |
| TBB_GIBFU | Gibberella fujikuroi | SEQ ID NO. 222 |
| TBB_HALDI | Haliotis discus | SEQ ID NO. 223 |
| TBB_HORVU | Hordeum vulgare | SEQ ID NO. 224 |
| TBB_LEI ME | Leishmania mexicana | SEQ ID NO. 225 |
| TBB_LYMST | Lymnae stagnalis | SEQ ID NO. 226 |
| TBB_LYTPI | Lytechinus pictus | SEQ ID NO. 227 |
| TBB_MYCPJ | Mycosphaerella pini | SEQ ID NO. 228 |
| TBB_NAEGR | Naegleria gruberi | SEQ ID NO. 229 |
| TBB_NEUCR | Neurospora crassa | SEQ ID NO. 230 |
| TBB_OCTDO | Octopus Dofleini | SEQ ID NO. 231 |
| TBB_ONCGI | Onchocerca gibsoni | SEQ ID NO. 232 |
| TBB_PARLI | Paracentrotus lividus | SEQ ID NO. 233 |
| TBB_PENDI | Penicillium digitatum | SEQ ID NO. 234 |
| TBB_PESMI | Pestalotiopsis microspora | SEQ ID NO. 235 |
| TBB_PHANO | Phaeosphaeria nodorum | SEQ ID NO. 236 |
| TBB_PHYCI | Phytophthora cinnamorni | SEQ ID NO. 237 |
| TBB_PIG | Sus scrofa | SEQ ID NO. 238 |
| TBB_PLAFA | Plasmodium falciparum | SEQ ID NO. 239 |
| TBB_PLAFK | Plasmodium falciparum | SEQ ID NO. 240 |
| TBB_PLESA | Pleurotus sajor-caju | SEQ ID NO. 241 |
| TBB_PNECA | Pneumocystis carinii | SEQ ID NO. 242 |
| TBB_POLAG | Polytomella agilis | SEQ ID NO. 243 |
| TBB_PSEAM | Pseudopleuronectes americanus | SEQ ID NO. 244 |
| TBBQ_HUMAN | Homo sapiens | SEQ ID NO. 245 |
| TBB_RHYSE | Rhynchosporium secalis | SEQ ID NO. 246 |
| TBB_SCHCO | Schizophyllum commune | SEQ ID NO. 247 |
| TBB_SCHPO | Schizosaccharomyces pombe | SEQ ID NO. 248 |
| TBB_STRPU | Strongylocentrotus purpuratus | SEQ ID NO. 249 |
| TBB_STYLE | Stylonichia lemnae | SEQ ID NO. 250 |
| TBB_TETPY | Tetrahymena pyriformis | SEQ ID NO. 251 |
| TBB_TETTH | Tetrahymena thermophila | SEQ ID NO. 252 |
| TBB_THAWE | Thalassiosira weisflogii | SEQ ID NO. 253 |
| TBB_TOXGO | Taxoplasma gondii | SEQ ID NO. 254 |
| TBB_TRYBR | Trypanosoma brucei | SEQ ID NO. 255 |
| TBB_TRYCR | Trypanosoma cruzi | SEQ ID NO. 256 |
| TBB_VENIN | Venturia inaequalis | SEQ ID NO. 257 |
| TBBX_HUMAN | Homo sapiens | SEQ ID NO. 258 |
| TBB_YEAST | Saccharomyces cerevisiae | SEQ ID NO. 259 |
| TBD_H U MAN | Homo sapiens | SEQ ID NO. 260 |
| TBE_HUMAN | Homo sapiens | SEQ ID NO. 261 |
| TBG1_HUMAN | Homo sapiens | SEQ ID NO. 262 |
| TBG1_MAIZE | Zea mays | SEQ ID NO. 263 |
| TBG1_MOUSE | Mus musculus | SEQ ID NO. 264 |
| TBG2_ARATH | Arabidopsis thaliana | SEQ ID NO. 265 |
| TBG2_DROM E | Drosophila melanogaster | SEQ ID NO. 266 |
| TBG2_EU PCR | Monoeuplotes crassus | SEQ ID NO. 267 |
| TBG2_EUPOC | Euplotes octocarinatus | SEQ ID NO. 268 |
| TBG2_HUMAN | Homo sapiens | SEQ ID NO. 269 |
| TBG2_MAIZE | Zea mays | SEQ ID NO. 270 |
| TBG2_MOUSE | Mus musculus | SEQ ID NO. 271 |
| TBG2_ORYSA | Oryza sativa | SEQ ID NO. 272 |
| TBG3_MAIZE | Zea mays | SEQ ID NO. 273 |
| TBG_ANEPH | Anemia phyllitidis | SEQ ID NO. 274 |
| TBG_CAEEL | Caenorhabditis elegans | SEQ ID NO. 275 |
| TBG_CANAL | Candida albicans | SEQ ID NO. 276 |
| TBG_CHLRE | Chlamydomonas reinhardtii | SEQ ID NO. 277 |
| TBG_COCHE | Cochlioboius heterostrophus | SEQ ID NO. 278 |
| TBG_EMENI | Emericella nidulans | SEQ ID NO. 279 |
| TBG_ENTHI | Entamoeba histolytica | SEQ ID NO. 280 |
| TBG_EUPAE | Euplotes aediculatus | SEQ ID NO. 281 |
| TBG_NEUCR | Neurospora crassa | SEQ ID NO. 282 |
| TBG_PHYPA | Physcomitrella patens | SEQ ID NO. 283 |
| TBG_PLAFO | Plasmodium falciparum | SEQ ID NO. 284 |
| TBG_RETFI | Reticulomyxa filosa | SEQ ID NO. 285 |
| TBG_SCHJP | Schizosaccharomyces japonicus | SEQ ID NO. 286 |
| TBG_SCHPO | Schizosaccharomyces pombe | SEQ ID NO. 287 |
| TBG_USTVI | Microbotryum violaceum | SEQ ID NO. 288 |
| TBG_XENLA | Xenopus laevis | SEQ ID NO. 289 |
| TBG_YEAST | Saccharomyces cerevisiae | SEQ ID NO. 290 |

[0053] Referring again to the Tuszynksi paper, and in referring to “Model Construction.” the paper disclosed that: “The structures of alpha and beta tubulins are known to be quite similar, being nearly indistinguishable at 6 Angstroms . . . dispite only a 40% amino acid homology.” As support for this statement, reference is made to an article by H. Li et al., “Microtubule structure at 8 angstrom resolution,” Structure 10:1317-1328, 2002.”

[0054] Referring again to the Tuszynksi paper, it is disclosed that: “ . . . Since the sequences within an alpha or beta tubulin family are more similar to each other than to those sequences belonging to the other families of tubuins, it is reasonable to believe that any given sequence should produce a structure very similar to another member of a given family. Further support for this comes from the published structures of Nogales et al. (1998) and Lowe et al. (2001) which are of a porcine sequence, but which were fit to data from an inhomogeneous bovine sample.” The Nogales et al. reference is to an article by E. Nogales et al., “Structure of the alpha/beta tubulin dimmer by electron crystallogaraphy,” Nature 393: 199-303. The Lowe et al. reference was to an article by J. Lowe et al., “Refined structure of alpha/betal tubulin at 3.5 angstrom resolution,” Journal of Molecular Biology 313:1045-1057 (2001).

[0055] Referring again to the Tuszynksi paper, it is disclosed that: “Accordingly, by substituting appropriate amino acid side chains and properly adjusting other residues to accommodate insertions and deletions and in the sequence, crystallographic structures can be used as a framework to produce model structures with different sequences with a high degree of confidence.”

[0056] As is also disclosed in the Tuszynski et al. paper, “To build such 3D structures of the many isotypes Modeller (version 6.2) was used [Marti-Renom 2000].” The Marti-Renom reference is an article by M. A. Marti-Renom et al., “Comparative protein structure modeling of genes and genomes,” Annu. Rev. Biophys. Biomol. Struct. 29:291-325, 2000.

[0057] In the Marti-Renom paper, it is stated that the MODELLER database is disclosed at “guitar.Rockefeller.edu/modeler.html” and is discussed in an article by A. Sali et al., “Comparative protein modeling by satisfaction of spatial restraints,” J. Mol. Biol. 234:799-915, 1993.

[0058] The Modeller database is also referred to in the patent literature. Reference may be had, e.g., to U.S. Pat. Nos. 5,859,972; 5,968,782; 5,985,643; 6,225,446; 6,251,620 (three dimensional structure of a ZAP tyrosine protein kinase fragment and modeling methods), U.S. Pat. Nos. 6,391,614; 6,417,324; 6,459,996; 6,468,772; 6,495,354; 6,495,674; 6,532,437; 6,559,297; 6,605,449; 6,642,041; 6,607,902; 6,645,762; 6,569,656; 6,677,377 (structure based discovery of inhibitors of matriptase for the treatment of cancer and other conditions), U.S. Pat. No. 6,680,176; and the like. The entire disclosure of each of these United States patents is hereby incorporated by reference into this specification.

[0059] The Modeller database may be used for the “comparative protein structure modeling” that is discussed in, e.g., the Marti-Renom paper (and also in the Tuszynski paper) . . . Such “comparative protein structure modeling” is also referred to in the patent literature. Reference may be had, e.g., to U.S. Pat. Nos. 6,462,189; 6,703,199; and 6,703,901; reference may also be had to published United States patent applications 2002/0045578 and 2004/0014944 (method and system useful for structural classification of unknown polypeptides); and reference also may be had to international patent publications WO0135255 (large scale comparative protein structure modeling); WO0234877; WO03019183 (process for the informative and iterative design of a gene-family screening library), and WO03029404. The entire disclosure of each of these United States patents, of each of these published United States patent applications, and of each of these international patent applications, is hereby incorporated in its entirety into this specification.

[0060] Referring again to the Tuszynksi paper, and to the Modeller program used therein, it is disclosed that: “To build the library of 3D tubulin structures, Modeller (version 6v2) was used . . . . This program uses alignment of the sequences with known related structures, used as templates, to obtain spatial constraints that the output structure must satisfy. Additional restraints derived from statistical studies of representative protein and chemical structures are also used to ensure a physically probable result. Missing loop regions are predicuted by simulated annealing optimization of a molecular mechanics model.”

[0061] As is known to those skilled in the art, a system as large as tubulin may have many local energy minima; thus, an energy minimization program may not be sufficient to find the lowest global minimum. To seek the difference in conformation between GTP (guanosine triphosphate) and GDP (guanosine diphosphate) tubulin, applicants preferably use an annealing procedure in which the molecule is heated up well beyond physiological temperatures to induce a difference in conformation and is then slowly cooled down below physiological temperatures. The cooling process is maintained at a low enough rate so that the molecule can move between minima and find a lower energy final conformation. For a similar process that is applied by kinesin, reference may be had, e.g., to an article by W. Wriggers et al. on “Nucleotide-dependent movements of the kinesis motor domain predicted by simulated annealing,” Biophys. J., 75:646-661, August, 1998.

[0062] In one embodiment of the process of this invention, the TINKER molecular simulation software is used. This software package is described, e.g., in an article by M. J. Dudek et al. on the “Accurate modeling of the intramolecular electrostatic energy of proteins,” J. Comput. Chem, 16:791-816, 1995. This TINKER software is also described in, e.g., U.S. Pat. Nos. 5,049,390; 6,180,612; 6,531,306; 6,537,791; and 6,573,060. The entire disclosure of each of these United States patents is hereby incorporated by reference into this specification.

[0063] In one embodiment, the TINKER anneal program is preferably used to heat up the proteins from 1 degree Kelvin to 400 degrees Kelvin and then cool them very slowly to 200 degrees Kelvin.

[0064] In one embodiment, the anneal program is used to heat up the proteins from a temperature of from about 1 to about 299 degrees Kelvin to a temperature within the range of from about 300 to about 500 degrees Kelvin linearly over a period of from about 100 to about 100,000 picoseconds, preferably, over a period of at least about 200 picoseconds.

[0065] Referring again to the Tuszynksi paper, it is disclosed therein that “Since the 3D structures of tubulin lack the extreme C-termini of the proteins, we used this capability to create structure files that include the C-terminal amino acids by including those portions of the sequence in the Modeller input.” In the process of this invention, the tubulin with its C-terminii, “tubulin-C,” may be generated by adding the missing residues onto the alpha band beta-tubulin. Thus, e.g., one may use the “MOLMOL” software to add the “missing residues.” See, e.g., an article by R. Koradi, “MOLMOL: a program for display and analysis of macromolecular structures,” J. Mol. Graphics, 14:51-55, 1996. Reference also may be had, e.g., to U.S. Pat. No. 6,077,682 (method of identifying inhibitors of sensor histidine kinases through rational drug design); U.S. Pat. Nos. 6,162,627; 6,171,804 (method of determining interdomain orientation and changes of interdomain orientation on ligaton), U.S. Pat. No. 6,723,697; and the like. The entire disclosure of each of these United States patents is hereby incorporated by reference into this specification.

[0066] In the process described in the Tuszynski paper, the missing residues were added by the Modeller software, and the “tubulin-C model” was then subjected to an energy minimization program. As is known to those skilled in the art, in an energy minimization program, one searches for the minimum energy configuration of a molecule by moving down a gradient through configuration space (see W. F. van Gusteren et al., “Computer simulation of molecular dynamics: Methodology, applications and perspectives in chemistry,” Angew. Chem. Int. Ed. Engl., 29-992-1023, 1990. Reference also may be had, e.g., to U.S. Pat. No. 5,453,937 (method and system for protein modeling); U.S. Pat. No. 5,557,535 (method and system for protein modeling); U.S. Pat. No. 5,884,230 (method and system for protein modeling); U.S. Pat. No. 6,188,965 (apparatus and method for automated protein design); U.S. Pat. No. 6,269,312 (apparatus ad method for automated protein design); U.S. Pat. Nos. 6,376,504; 6,380,190; 6,403,312 (protein design automatic for protein libraries); U.S. Pat. Nos. 6,514,729; 6,545,152; 6,682,923; 6,689,793; 6,708,120 (apparatus and method for automated protein design); U.S. Pat. Nos. 6,746,853; 6,750,325; and the like. The entire disclosure of each of these United States patents is hereby incorporated by reference into this specification.

[0067] Referring again to the Tuszynski paper, it is disclosed that: “For our work we used five structures from the tubulin family as templates. One of these from PDB file 1FSZ (Lowe and Amos, 1998) is the crystal structure of FtsZ, a putative prokaryontic homolog of tublin Erickson (1997).” The Lowe and Amos reference is an article by J. Lowe et al., “Crystal Structure of the bacterial cell-division protein FtsZ,” Nature, 393:203-206, 1998. The Erickson reference is an article by H. P. Erickson, “FtsZ, a tubulin homologue, in prokaryote cell division,” Trends Cell Biol., 7:362-367, 1997. Reference also may be had, e.g., to U.S. Pat. No. 6,350,866, the entire disclosure of which is hereby incorporated by reference in to this specification.

[0068] Another two of the tubulin templates described in the Tuszynski paper were described as being “Two more structures (and alpha- and a beta-monomer) came from 1TUB (Nogales et al., 1998), the original tubulin crystal . . . ” The Nogales et al. reference is E. S. Nogales et al., “Structure of the alpha/beta tubulion dimmer by electron crystallography,” Nature 393:199-203, 1998.

[0069] Yet another two of the tubulin templates described in the Tuszynski paper were “ . . . two more from 1JFF (Lowe et al. 2001), a more refined version of the same structure.” The Lowe et al. reference is an article by J. H. Lowe et al. on “Refined structure of alpha/beta tubulin at 3.5 angstrom resolution,” Journal of Molecular Biology, 313:1045-1057, 2001.

[0070] As is also disclosed in the Tuszynski et al. paper, “With the resulting library of structural tubulin models, various computational estimates of physical properties of the different tubulins may be made. These include the volume, surface area, net charge, and dipole moments. We performed these calculations on the model structures, typically using analysis tools within the Gromacs (Lindahl et al., 2001) molecular dynamics package (version 3.1.4) . . . .” The Lindahl et al. reference was an article by E. B. Lindahl et al. entitled “GROMACS 3.0: A package for molecular simulation and trajectory analysis,” J. Mol. Mod., 7:306-317, 2001. Reference also may be had, e.g., to published United States patent applications 2003/0082521, 2003/0108957, 2003/0187626 (method for providing thermal excitation to molecular dynamics models), and 2003/0229456 (methods for predicting properties of molecules). The entire disclosure of each of these published patent applications is hereby incorporated by reference into this specification.

[0071] As is also disclosed in the Tuszynski article, “We also analyzed the properties of the C-terminal projection. We first needed to define this region. We used Clustal W (version 1.82) (Thompson et al., 1994) in order to obtain a multiple sequence alignment amongst the peptides. The multiple alignment then allows rapid identification of corresponding residues in all of the sequences.” The Thompson et al. reference is an article by J. D. Thompson et al. on “CLUSTAL W: Improving the sensitivity of progressive multiple sequence alignment through sequence weighting, positions-specific gap penalties and weight matrix choice,” Nucleic Acids Research, 22:4673-4680, 1994. Reference also may be had, e.g., to U.S. Pat. Nos. 6,403,558; 6,451,548; 6,465,431; 6,489,537; 6,559,294; 6,582,950; 6,632,621; 6,653,283; 6,586,401; 6,589,936; 6,734,283; and the like. The entire disclosure of each of these United States patents is hereby incorporated by reference into this specification.

[0072] As is also disclosed in the Tuszynski paper, “Other interesting properties of tubulin are inherent to dimers. In order to create a set of dimers for study we fit an alpha-monomer and a beta-monomer to their corresponding monomers in the 1JFF structure. This was done by rotation and translation of the Modeller structures in order to minimize the RMSD between a set of alpha-carbons from residues present in all the sequences. This procedure does not prevent steric conflicts between the two monomers and can create dimers with overlaps. However, for some types of calculations such as estimates of multipole components, this will not prevent reasonable results. A set of over 200 dimers was obtained in this way by constructing all the alpha-beta pairs that share a common species identifier in the Swiss-Prot name. This restricts the number of dimers to a manageable set and voids hybrids such as a carrot/chicken crossing that would not occur naturally.”

[0073] As is also disclosed in the Tuszynski paper, “The library of tubulin structures . . . were analyzed by molecular mechanics to determine their net charges, dipole moment components, dipole orientations, volumes, surface areas and the lengths and charges of their C-termini. The results of our computations in this regard are shown in Table 2.” The Table 1 below contains the data presented in the Table 2 of the article.

TABLE 1
TABLE 1

| | | | | | Net | Volume | |
|---|---|---|---|---|---|---|---|
| Name | <M_x> | <M_y> | <M_z> | <IMI> | Chg | A\hat{ }3 | Area A\hat{ }2 |
| TBA1_ANEPH | −3.02E+02 | −6.06E+02 | 1.16E+03 | 1.34E+03 | −22 | 43722.51 | 46119.66 |
| TBA1_ARATH | 5.03E+01 | −4.69E+02 | 1.50E+03 | 1.57E+03 | −24 | 43725.6 | 46097.33 |
| | | | | | | | 43082.05 |
| TBA1_CHICK | −2.84E+02 | −9.75E+02 | 1.61E+003 | 1.90E+03 | −21 | 40489.52 | |
| | | | | | | | F |
| TBA1_CHLRE | −6.10E+01 | −7.44E+02 | 7.28E+02 | 1.04E+03 | −21 | 43642.98 | 45933.57 |
| TBA1_DROME | 5.95E+01 | −6.29E+02 | 1.05E+03 | 1.23E+03 | −22 | 44030.65 | 46824.19 |
| TBA1_ELEIN | −5.54E+01 | −3.29E+02 | 1.37E+03 | 1.41E+003 | −24 | 43860.52 | 46749.02 |
| TBA1 _EMENI | −1.86E+02 | −1.23E+03 | 7.71E+002 | 1.47E+03 | −24 | 44069.69 | 46434.2 |
| TBA1 _ENTHI | 2.50E+02 | −6.70E+02 | 1.46E+02 | 7.30E+02 | −10 | 44061.3 | 46460.88 |
| TBA1_HOMAM | −1.53E+02 | −1.15E+03 | 9.52E+02 | 1.50E+03 | −22 | 44167.33 | 46824.48 |
| TBA1_HORVU | 1.55E+02 | −3.40E+02 | 1.27E+03 | 1.32E+03 | −23 | 43590.96 | 45826.84 |
| TBA1 _HUMAN | −4.67E+02 | −8.10E+02 | 1.11E+03 | 1.45E+03 | −24 | 44250.31 | 47173.96 |
| TBA1_MAIZE | 1.03E+02 | −3.28E+02 | 1.28E+03 | 1.32E+03 | −24 | 43834.72 | 46651.62 |
| TBA1_MOUSE | −3.33E+02 | −1.21E+03 | 7.70E+02 | 1.47E+03 | −24 | 44263.22 | 47101.9 |
| TBA1_NEUCR | 4.87E+01 | −6.76E+02 | 6.94E+02 | 9.70E+02 | −19 | 44052.23 | 46358.29 |
| TBA1_ORYSA | −2.19E+02 | −1.16E+03 | 1.12E+03 | 1.62E+03 | −24 | 43648.39 | 45939.87 |
| TBA1_PARLI | 2.71E+002 | −1.19E+03 | 1.78E+03 | 2.16E+03 | −25 | 44183.57 | 46803.97 |
| TBA1_PEA | −3.23E+02 | −7.69E+02 | 1.05E+03 | 1.34E+03 | −23 | 43567.64 | 45723.58 |
| TBA1_PELFA | −4.01E+002 | −1.41E+003 | 8.27E+002 | 1.68E+003 | −24 | 43906.79 | 46567.68 |
| TBA1_PNECA | −2.57E+001 | −9.24E+002 | 9.87E+002 | 1.35E+003 | −20 | 44334.85 | 47012.18 |
| TBA1_SCHPO | −2.56E+000 | −1.26E+003 | 6.43E+002 | 1.41E+003 | −22 | 44895.34 | 47968.48 |
| TBA1_STYLE | −2.03E+002 | −1.27E+003 | 8.29E+002 | 1.53E+003 | −23 | 43243.03 | 45451.26 |
| TBA1_VOLCA | −1.26E+002 | −8.00E+002 | 6.88E+002 | 1.06E+003 | −21 | 43630.21 | 45981.34 |
| TBA1_YEAST | −1.90E+002 | −9.79E+002 | 4.23E+002 | 1.08E+003 | −22 | 43873.76 | 46461.59 |
| | | | | | | | 37487.42 |
| TBA2_ANEPH | −2.78E+002 | −8.85E+002 | 1.35E+003 | 1.64E+003 | −15 | 35461.49 | |
| | | | | | | | F |
| TBA2_ARATH | −1.18E+002 | −6.40E+002 | 1.50E+003 | 1.63E+003 | −23 | 43766.11 | 46803.45 |
| TBA2_CAEEL | −1.39E+002 | −8.51E+002 | 1.07E+003 | 1.37E+003 | −22 | 43890.89 | 46319.2 |
| TBA2_CHICK | −9.83E+001 | −2.00E+002 | 1.12E+003 | 1.14E+003 | −25 | 43774.22 | 46365.41 |
| TBA2_CHLRE | −1.41E+002 | −8.09E+002 | 7.99E+002 | 1.15E+003 | −22 | 43601.27 | 45660.58 |
| TBA2_DROME | −9.25E+001 | −1.09E+003 | 7.03E+002 | 1.30E+003 | −21 | 44116.52 | 46892.4 |
| TBA2_ELEIN | 3.81E+001 | −3.80E+002 | 1.39E+003 | 1.44E+003 | −21 | 43843.11 | 45940.56 |
| TBA2_EM EN I | −3.11E+002 | −1.41E+003 | 6.14E+002 | 1.57E+003 | −21 | 44173.08 | 46890.29 |
| TBA2_HOMAM | −7.38E+002 | −6.68E+002 | 9.66E+002 | 1.39E+003 | −20 | 44252.35 | 47078.27 |
| TBA2_HORVU | −1.24E+002 | −5.45E+002 | 1.44E+003 | 1.54E+003 | −24 | 43705.55 | 46254.23 |
| TBA2_HUMAN | −7.89E+001 | −1.27E+003 | 7.92E+002 | 1.49E+003 | −23 | 44045.61 | 46631.11 |
| TBA2_MAIZE | 3.87E+001 | −3.08E+002 | 1.32E+003 | 1.35E+003 | −24 | 43670.06 | 46059.53 |
| TBA2_MOUSE | −4.62E+002 | −1.26E+003 | 7.32E+002 | 1.53E+003 | −24 | 44188.6 | 46902.07 |
| TBA2_NEUCR | −4.64E+002 | −8.59E+002 | 6.78E+002 | 1.19E+003 | −22 | 43969.77 | 46397.94 |
| TBA2PATVU | −7.08E+002 | −1.23E+003 | 9.86E+002 | 1.73E+003 | −24 | 44205.67 | 46802.41 |
| TBA2_PELFA | −5.63E+002 | −1.35E+003 | 1.09E+003 | 1.82E+003 | −25 | 43972.36 | 46729.96 |
| TBA2_SCHPO | −3.69E+002 | −6.06E+002 | 7.84E+002 | 1.06E+003 | −23 | 44413.68 | 47084.43 |
| TBA2_STYLE | −1.52E+002 | −1.20E+003 | 1.42E+003 | 1.87E+003 | −21 | 43462.96 | 45794.68 |
| TBA3_ARATH | −1.37E+002 | −6.23E+002 | 1.31E+003 | 1.45E+003 | −23 | 43767.64 | 46340.56 |
| | | | | | | | 34076.89 |
| TBA3_CHICK | 9.52E+001 | −1.35E+003 | 4.35E+002 | 1.42E+003 | −11 | 31862.21 | |
| | | | | | | | F |
| TBA3_DROME | 8.39E+001 | −5.89E+002 | 9.56E+002 | 1.13E+003 | −22 | 44025.38 | 46744.36 |
| TBA3_ELEIN | −2.23E+002 | −1.06E+003 | 7.94E+002 | 1.34E+003 | −24 | 43622.68 | 45927.05 |
| TBA3_HOMAM | −4.66E+002 | −1.35E+003 | 9.96E+002 | 1.74E+003 | −24 | 44023.88 | 46424.8 |
| TBA3_HORVU | 1.67E+002 | −2.61E+002 | 1.19E+003 | 1.23E+003 | −24 | 43774.25 | 46614.74 |
| TBA3_MAIZE | −2.26E+002 | −9.73E+002 | 1.25E+003 | 1.60E+003 | −20 | 43523.21 | 45861.11 |
| TBA3_MOUS E | −7.89E+001 | −1.27E+003 | 7.92E+002 | 1.49E+003 | −23 | 44045.61 | 46631.11 |
| TBA3_YEAST | −3.29E+001 | −1.38E+003 | 7.81E+001 | 1.38E+003 | −20 | 43772.88 | 46394.31 |
| | | | | | | | 34085.01 |
| TBA4_CHICK | −7.55E+001 | −1.23E+003 | 1.34E+003 | 1.82E+003 | −19 | 31763.1 | |
| | | | | | | | F |
| TBA4_DROME | −4.56E+002 | −9.92E+002 | 8.14E+002 | 1.36E+003 | −18 | 44749.62 | 46802.21 |
| TBA4_HUMAN | −4.56E+001 | −7.37E+002 | 1.29E+003 | 1.49E+003 | −24 | 44006.12 | 46802.17 |
| TBA4_MAIZE | 1.91E+002 | 5.47E+002 | 5.31E+002 | 7.86E+002 | −13 | 5653.1 | 6441.79 F |
| TBA5_CHICK | −5.61E+002 | −8.51E+002 | 9.93E+002 | 1.42E+003 | −24 | 44001.41 | 46787.46 |
| TBA5_MAIZE | 1.18E+002 | −3.59E+002 | 1.20E+003 | 1.26E+003 | −24 | 43664.32 | 46180.91 |
| TBA6_ARATH | −4.74E+002 | −9.38E+002 | 1.03E+003 | 1.47E+003 | −23 | 43549.12 | 45981.06 |
| TBA6_HUMAN | −1.51E+002 | −8.12E+002 | 9.12E+002 | 1.23E+003 | −23 | 44019.72 | 46935.74 |
| TBA6_MAIZE | 1.05E+002 | −2.29E+002 | 1.28E+003 | 1.30E+003 | −24 | 43616.26 | 45962.24 |
| TBA6_MOUS E | −4.97E+002 | −8.04E+002 | 8.36E+002 | 1.26E+003 | −23 | 44005.43 | 46878.15 |
| TBA8_CAEEL | 4.38E+001 | −1.35E+003 | 6.07E+002 | 1.48E+003 | −21 | 44092.19 | 46452.13 |
| | | | | | | | 34147.91 |
| TBA8_CHICK | −3.14E+002 | −1.21E+003 | 6.74E+002 | 1.42E+003 | −17 | 31941.5 | |
| | | | | | | | F |
| TBA8_HUMAN | −2.56E+002 | −1.13E+003 | 6.47E+002 | 1.33E+003 | −24 | 44108.74 | 46846.78 |
| TBA8_MOUS E | 2.58E+001 | −9.76E+002 | 5.25E+002 | 1.11E+003 | −23 | 44094.24 | 46772.18 |
| | | | | | | | 42810.21 |
| TBA_AJECA | 4.11E+002 | −5.71E+002 | −3.80E+002 | 8.00E+002 | −11 | 40915.67 | |
| | | | | | | | F |
| | | | | | | | 22925.51 |
| TBAA_PN ECA | 4.02E+002 | −4.58E+002 | −3.47E+002 | 7.01E+002 | 0 | 21163.74 | |
| | | | | | | | F |
| TBAA_SCHCO | 6.78E+000 | −9.52E+002 | 6.63E+002 | 1.16E+003 | −20 | 43528.88 | 46457.95 |
| TBA_AVESA | 4.40E+002 | −3.62E+002 | 3.57E+002 | 6.72E+002 | −17 | 43193.08 | 45318.02 |
| TBA_BLEJA | −1.14E+002 | 4.91E+001 | 5.37E+001 | 1.35E+002 | −17 | 4939.05 | 5726.72 F |
| TBA_BOMMO | −1.56E+002 | −1.02E+003 | 5.91E+002 | 1.19E+003 | −23 | 44002.66 | 46587.95 |
| TBAB_SCHCO | 1.68E+002 | −8.87E+002 | 1.06E+003 | 1.39E+003 | −17 | 43480.44 | 46447.1 |
| TBA_CANAL | −2.94E+002 | −1.58E+003 | 1.45E+002 | 1.61E+003 | −20 | 43827.47 | 46383.14 |
| TBA_CHLVU | −3.40E+002 | −1.04E+003 | 6.60E+002 | 1.28E+003 | −23 | 43800.27 | 46511.59 |
| TBA_DICDI | −2.65E+002 | −8.18E+002 | 4.88E+002 | 9.88E+002 | −15 | 44897.67 | 47487.03 |
| TBAD_PHYPO | 7.24E+001 | −8.54E+002 | 1.25E+003 | 1.51E+003 | −22 | 43832.96 | 46203.15 |
| TBAE_PHYPO | 5.38E+001 | −8.04E+002 | 9.48E+002 | 1.24E+003 | −22 | 43712.79 | 46164.96 |
| TBA_EUGGR | −5.50E+002 | −9.02E+002 | 7.55E+002 | 1.30E+003 | −23 | 44007.88 | 46521.52 |
| TBA_EU POC | 3.58E+000 | −8.90E+002 | 8.98E+002 | 1.26E+003 | −22 | 43646.63 | 46268.82 |
| TBA_EU PVA | −3.61E+002 | −9.45E+002 | 6.25E+002 | 1.19E+003 | −22 | 43678.31 | 46191.85 |
| TBA_HAECO | −5.01E+002 | −9.24E+002 | 1.01E+003 | 1.45E+003 | −23 | 44184.78 | 46867.6 |
| TBA_LEPSE | 0 | | | | | 2420.34 | 2750.51 F |
| TBA_LYTPI | −8.32E+002 | −1.07E+003 | 1.57E+003 | 2.07E+003 | −11 | 15959.86 | 17858.74 |
| TBA_MYCGR | 1.31E+001 | −1.13E+003 | 8.25E+001 | 1.13E+003 | −24 | 43927.86 | 46753.33 |
| TBA_NAEGR | −4.44E+002 | −1.04E+003 | 3.75E+002 | 1.19E+003 | −23 | 44031.56 | 47036.09 |
| TBA_NOTVI | −1.47E+002 | −8.20E+002 | 1.11E+003 | 1.39E+003 | −24 | 44167.23 | 47197.14 |
| TBAN_PHYPO | −1.15E+002 | −9.60E+002 | 8.97E+002 | 1.32E+003 | −23 | 43607.45 | 45977.08 |
| TBA_OCTDO | −1.92E+002 | −1.38E+003 | 1.19E+003 | 1.84E+003 | −22 | 44189.74 | 46624.65 |
| | | | | | | | 25881.13 |
| TBA_OCTVU | −3.40E+002 | −1.21E+003 | 1.28E+003 | 1.79E+003 | −12 | 23897.38 | |
| | | | | | | | F |
| TBA_ONCKE | −1.99E+002 | −1.15E+003 | 1.11E+003 | 1.61E+003 | −24 | 43491.82 | 46581.51 |
| TBA_OXYGR | −8.66E+001 | −1.08E+003 | 8.99E+002 | 1.41E+003 | −23 | 43713.34 | 46373.82 |
| | | | | | | | 12137.53 |
| TBA_PICAB | −1.02E+002 | −9.19E+001 | −1.23E+002 | 1.84E+002 | −10 | 11088.01 | |
| | | | | | | | F |
| TBA_PIG | −4.06E+002 | −1.20E+003 | 6.32E+002 | 1.42E+003 | −25 | 44083.31 | 46762.84 |
| TBA_PLAFK | −6.63E+002 | −1.02E+003 | 1.09E+003 | 1.64E+003 | −22 | 44159.95 | 46868.83 |
| | | | | | | | 20787.14 |
| TBA_PLAYO | −4.57E+002 | −9.08E+002 | 9.83E+002 | 1.41E+003 | −12 | 19399.72 | |
| | | | | | | | F |
| TBA_PRUDU | −2.93E+002 | −1.09E+003 | 7.65E+002 | 1.36E+003 | −23 | 43611.95 | 46257.89 |
| TBA_SORMA | −5.77E+001 | −5.78E+002 | 8.84E+002 | 1.06E+003 | −23 | 43781.31 | 46691.13 |
| TBA_TETPY | 1.49E+002 | −8.36E+002 | 8.32E+002 | 1.19E+003 | −21 | 43728.45 | 46142.49 |
| TBA_TETTH | −5.13E+001 | −7.26E+002 | 8.46E+002 | 1.12E+003 | −21 | 43757.64 | 46334.88 |
| TBAT_ONCMY | −1.81E+002 | −1.07E+003 | 8.98E+002 | 1.41E+003 | −23 | 44043.36 | 46640.52 |
| TBA_TO R MA | −2.02E+002 | −1.15E+003 | 6.45E+002 | 1.33E+003 | −24 | 44318.53 | 47358.43 |
| TBA_TOXGO | 2.03E+002 | −1.08E+003 | 1.11E+003 | 1.56E+003 | −23 | 44098.44 | 46708.74 |
| TBATRYBR | −1.72E+002 | −1.00E+003 | 8.63E+002 | 1.33E+003 | −24 | 43867.8 | 46476.58 |
| TBA_TRYCR | −3.14E+002 | −1.05E+003 | 9.14E+002 | 1.42E+003 | −25 | 43758.17 | 46172.03 |
| TBA_WHEAT | 2.00E+002 | −6.80E+002 | 1.39E+003 | 1.56E+003 | −24 | 43805.34 | 46562.2 |
| TBA_XEN LA | −2.31E+002 | −1.10E+003 | 6.83E+002 | 1.31E+003 | −23 | 43943 | 46478.64 |
| | | | | | | | 45949.82 |
| TBB1_ANEPH | −2.40E+002 | −6.68E+002 | 1.53E+003 | 1.69E+003 | −21 | 43331.36 | |
| | | | | | | | F |
| TBB1_ARATH | −1.22E+003 | −1.02E+003 | 2.69E+003 | 3.13E+003 | −27 | 43751.93 | 46146.83 |
| TBB1_AVESA | −8.00E+002 | −1.71E+003 | 2.56E+003 | 3.18E+003 | −25 | 38101.3 | 41156.74 |
| TBB1_BRUPA | −2.70E+002 | −6.98E+002 | 1.81E+003 | 1.96E+003 | −26 | 43981.4 | 46705.33 |
| TBB1 _CHICK | −1.13E+003 | −1.02E+003 | 1.51E+003 | 2.15E+003 | −25 | 43815.13 | 46865.04 |
| TBB1 _CHOCR | −6.25E+002 | 2.36E+002 | 1.77E+003 | 1.89E+003 | −27 | 43977.7 | 45918.5 |
| TBB1_COLGL | −1.39E+003 | −1.22E+003 | 3.07E+003 | 3.58E+003 | −24 | 43616.55 | 45527.47 |
| TBB1_COLGR | −2.58E+002 | −6.84E+002 | 2.23E+003 | 2.35E+003 | −24 | 43341.08 | 45417.82 |
| TBB1_CYAPA | −1.03E+003 | −1.03E+003 | 1.46E+003 | 2.06E+003 | −25 | 43703.53 | 46639.47 |
| TBB1_DAUCA | −1.29E+003 | −4.57E+002 | 2.76E+003 | 3.08E+003 | −17 | 31337.94 | 33360.35 |
| TBB1_ELEIN | −1.10E+003 | −1.03E+003 | 2.71E+003 | 3.10E+003 | −26 | 43749.89 | 46609.62 |
| TBB1 _EMENI | −3.24E+002 | −1.74E+003 | 1.74E+003 | 2.48E+003 | −23 | 43750.84 | 46675.24 |
| TBB1 _GADMO | −1.02E+003 | −1.16E+003 | 1.20E+003 | 1.95E+003 | −25 | 43817.93 | 47122.12 |
| TBB1_GEOCN | −9.55E+002 | −9.87E+002 | 1.33E+003 | 1.91E+003 | −24 | 43808.6 | 46274.2 |
| TBB1_HOMAM | −1.24E+003 | −1.24E+003 | 2.66E+003 | 3.19E+003 | −24 | 44266.15 | 45948.21 |
| TBB1 _HU MAN | −4.95E+002 | −1.36E+003 | 2.04E+003 | 2.50E+003 | −25 | 43765.02 | 46853.55 |
| TBB1 _LU PAL | −1.56E+003 | −1.20E+003 | 2.93E+003 | 3.53E+003 | −25 | 43898.24 | 46734.22 |
| TBB1 _MAIZE | −8.98E+002 | −1.44E+003 | 2.28E+003 | 2.84E+003 | −25 | 43776.83 | 46781.39 |
| TBB1 _MANSE | 3.26E+001 | −4.73E+002 | 1.77E+003 | 1.83E+003 | −25 | 44083.08 | 46838.17 |
| TBB1_NOTCO | −9.76E+002 | −1.32E+003 | 2.51E+003 | 3.00E+003 | −25 | 43698.37 | 46442.69 |
| TBB1 _ORYSA | −1.04E+003 | −1.14E+003 | 1.59E+003 | 2.22E+003 | −25 | 43757.44 | 46832.09 |
| TBB1 _PARTE | −1.64E+002 | −1.30E+003 | 1.62E+003 | 2.08E+003 | −24 | 43491.13 | 46266.33 |
| | | | | | | | 46988.05 |
| TBB1_PEA | −1.68E+003 | −1.21E+003 | 3.14E+003 | 3.76E+003 | −26 | 44208.97 | |
| | | | | | | | F |
| TBB1_PHYPO | −2.55E+002 | −9.30E+002 | 1.51E+003 | 1.79E+003 | −23 | | |
| | | | | | | | 47046.49 |
| TBB1 _PORPU | −9.28E+002 | −9.18E+002 | 2.05E+003 | 2.43E+003 | −28 | 43887.44 | |
| | | | | | | | F |
| TBB1 _RAT | −1.24E+003 | −1.25E+003 | 2.47E+003 | 3.04E+003 | −25 | 43855.58 | 46823.88 |
| TBB1_SOLTU | −1.31E+003 | −1.08E+003 | 3.00E+003 | 3.45E+003 | −26 | 43921.08 | 45964.17 |
| TBB1_SOYBN | −1.99E+002 | −1.02E+003 | 1.77E+003 | 2.06E+003 | −22 | 43716.86 | 46392.04 |
| TBB1 _TRIVI | −2.09E+002 | −1.21E+003 | 1.46E+003 | 1.91E+003 | −21 | 43239.19 | 45386.6 |
| TBB1_VOLCA | −5.67E+002 | −1.31E+003 | 1.89E+003 | 2.37E+003 | −24 | 43622.7 | 46596.3 |
| TBB1_WHEAT | −8.62E+002 | −8.33E+002 | 2.00E+003 | 2.33E+003 | −25 | 44053.19 | 47377.04 |
| TBB2_ANEPH | −2.34E+002 | −1.01E+003 | 1.48E+003 | 1.81E+003 | −18 | 40451.27 | 43579.53 |
| TBB2_ARATH | −1.86E+003 | −8.40E+002 | 3.47E+003 | 4.03E+003 | −27 | 44380.25 | 47532.89 |
| TBB2_CAEEL | −1.22E+003 | −1.30E+003 | 2.60E+003 | 3.15E+003 | −24 | 44042.41 | 46516.26 |
| TBB2_CHICK | −9.85E+002 | −1.18E+003 | 2.51E+003 | 2.94E+003 | −24 | 43790.78 | 46641.57 |
| TBB2_COLGL | 4.51E+001 | −1.25E+003 | 2.44E+003 | 2.74E+003 | −24 | 43772.28 | 46801.36 |
| TBB2_COLG R | −6.48E+002 | −1.73E+003 | 2.32E+003 | 2.96E+003 | −24 | 43776.26 | 46725.65 |
| TBB2DAUCA | −3.80E+002 | −1.04E+003 | 1.48E+003 | 1.85E+003 | −25 | 43469.26 | 46734.07 |
| TBB2_DROER | −1.53E+003 | −1.19E+003 | 3.02E+003 | 3.59E+003 | −25 | 43757.19 | 46469.02 |
| TBB2_DROM E | −1.08E+003 | −1.15E+003 | 2.59E+003 | 3.03E+003 | −26 | 43646.93 | 46257.22 |
| TBB2_ELEIN | −5.42E+002 | −6.38E+002 | 2.37E+003 | 2.52E+003 | −26 | 44115.31 | 47287.17 |
| TBB2_EMENI | −3.49E+002 | −1.26E+003 | 2.11E+003 | 2.48E+003 | −22 | 43740.18 | 46549.31 |
| TBB2_ERYPI | −1.03E+003 | −1.43E+003 | 1.94E+003 | 2.62E+003 | −22 | 43844.47 | 46799.54 |
| TBB2_G EOCN | −1.16E+003 | −5.41E+002 | 2.71E+003 | 3.00E+003 | −28 | 44192.98 | 46317.34 |
| TBB2_HOMAM | −4.43E+002 | −9.20E+001 | 2.03E+003 | 2.08E+003 | −24 | 44467.04 | 45943.42 |
| TBB2_HUMAN | −1.83E+002 | −1.53E+003 | 1.72E+003 | 2.31E+003 | −25 | 43874.46 | 47063.85 |
| TBB2_LUPAL | −1.68E+003 | −1.16E+003 | 3.46E+003 | 4.02E+003 | −26 | 44006.64 | 46759.35 |
| TBB2_MAIZE | −9.72E+002 | −1.25E+003 | 2.49E+003 | 2.95E+003 | −23 | 43627.92 | 46573.3 |
| TBB2_ORYSA | −7.82E+002 | −1.02E+003 | 1.61E+003 | 2.06E+003 | −25 | 44025.13 | 47076.73 |
| TBB2_PEA | −1.87E+003 | −1.43E+003 | 2.80E+003 | 3.66E+003 | −28 | 44119.64 | 47264.21 |
| TBB2_PHYPO | −1.62E+003 | −9.87E+002 | 3.29E+003 | 3.80E+003 | −24 | 44197.53 | 47050.16 |
| TBB2_PORPU | −8.84E+002 | −5.18E+002 | 1.80E+003 | 2.07E+003 | −27 | 41546.31 | 44676.99 |
| TBB2_SOLTU | −9.18E+002 | −1.31E+003 | 2.27E+003 | 2.78E+003 | −26 | 44046.81 | 46135.05 |
| TBB2_SOYBN | −1.21E+003 | −1.42E+003 | 2.75E+003 | 3.32E+003 | −26 | 44355.5 | 47559.1 |
| TBB2_TRIVI | −5.10E+002 | −9.99E+002 | 2.41E+003 | 2.66E+003 | −24 | 43739.12 | 46059.81 |
| TBB2_WH EAT | −1.29E+003 | −8.96E+002 | 3.24E+003 | 3.61E+003 | −27 | 43864.6 | 46565.28 |
| TBB2_XENLA | −8.81E+002 | −8.68E+002 | 1.96E+003 | 2.32E+003 | −24 | 43639.84 | 46526.04 |
| | | | | | | | 25945.03 |
| TBB3_ANEPH | −7.63E+002 | −8.82E+002 | 1.87E+003 | 2.20E+003 | −9 | 24028.31 | |
| | | | | | | | F |
| TBB3_CHICK | −1.48E+003 | −1.08E+003 | 3.01E+003 | 3.52E+003 | −26 | 43756.1 | 46490.85 |
| TBB3_D ROME | −1.29E+003 | −1.65E+003 | 2.45E+003 | 3.22E+003 | −23 | 44396.18 | 46320.02 |
| TBB3_ELEIN | −1.51E+003 | −1.19E+003 | 2.31E+003 | 3.00E+003 | −27 | 43974.3 | 47141.63 |
| TBB3_MAIZE | −1.40E+003 | −1.05E+003 | 2.84E+003 | 3.34E+003 | −25 | 43485.86 | 46040.71 |
| TBB3_ORYSA | −1.39E+003 | −9.58E+002 | 2.79E+003 | 3.26E+003 | −27 | 43797.24 | 46373.71 |
| | | | | | | | 46648.94 |
| TBB3_PEA | −1.46E+003 | −1.53E+003 | 2.81E+003 | 3.52E+003 | −27 | 43323.16 | |
| | | | | | | | F |
| TBB3_PORPU | −1.17E+003 | −1.14E+003 | 2.60E+003 | 3.07E+003 | −26 | 43529.91 | 46185.14 |
| | | | | | | | 43199.08 |
| TBB3_SOYBN | 4.79E+002 | −1.01E+003 | −2.15E+002 | 1.14E+003 | −9 | 40339.02 | |
| | | | | | | | F |
| TBB3_WHEAT | −1.42E+003 | −1.03E+003 | 3.02E+003 | 3.49E+003 | −28 | 43670.95 | 46343.03 |
| TBB4_ARATH | −1.06E+003 | −1.21E+003 | 2.38E+003 | 2.87E+003 | −25 | 43750.97 | 46535.59 |
| TBB4_CAEEL | −1.01E+003 | −1.29E+003 | 1.88E+003 | 2.49E+003 | −24 | 43683.61 | 46649.3 |
| TBB4_CHICK | −1.14E+003 | −1.37E+003 | 2.71E+003 | 3.24E+003 | −24 | 44048.85 | 46490.78 |
| TBB4_ELEI N | −1.14E+003 | −9.75E+002 | 2.27E+003 | 2.72E+003 | −25 | 43906.03 | 46993.99 |
| TBB4_HUMAN | −1.15E+003 | −8.25E+002 | 2.06E+003 | 2.49E+003 | −25 | 44223.15 | 47073.77 |
| TBB4_MAIZE | −1.01E+003 | −9.45E+002 | 2.18E+003 | 2.58E+003 | −24 | 43757.47 | 46283.88 |
| TBB4_PORPU | −1.71E+003 | −1.27E+003 | 2.68E+003 | 3.42E+003 | −28 | 44129.26 | 47186.23 |
| TBB4_W H EAT | −7.03E+002 | −1.24E+003 | 2.34E+003 | 2.75E+003 | −25 | 43821.6 | 47046.07 |
| TBB4_XENLA | −1.18E+003 | −1.11E+003 | 2.71E+003 | 3.16E+003 | −24 | 43722.48 | 46674.76 |
| TBB5_ARATH | −1.80E+003 | −1.08E+003 | 3.25E+003 | 3.86E+003 | −28 | 44001.8 | 46634.56 |
| TBB5_CHICK | −7.93E+002 | −1.16E+003 | 2.21E+003 | 2.62E+003 | −25 | 43891.79 | 46604.44 |
| TBB5_ECTVR | −1.27E+003 | −1.16E+003 | 2.72E+003 | 3.22E+003 | −25 | 43750.92 | 46441.18 |
| TBB5_HUMAN | −8.71E+002 | −1.12E+003 | 1.95E+003 | 2.41E+003 | −24 | 43580.58 | 46339.09 |
| TBB5_MAIZE | −1.23E+003 | −1.21E+003 | 2.47E+003 | 3.01E+003 | −24 | 43798.93 | 46550.2 |
| TBB5_WHEAT | −7.11E+002 | −7.94E+002 | 2.47E+003 | 2.69E+003 | −26 | 44109.94 | 47148.65 |
| TBB6_ARATH | −1.78E+003 | −1.24E+003 | 2.49E+003 | 3.30E+003 | −28 | 44352.88 | 47605.4 |
| TBB6_CHICK | −1.10E+001 | −1.14E+003 | 1.81E+003 | 2.14E+003 | −20 | 44013.78 | 46378.76 |
| TBB6_ECTVR | −1.19E+003 | −1.20E+003 | 2.80E+003 | 3.27E+003 | −24 | 43894.94 | 46566.79 |
| TBB6_MAIZE | −8.83E+002 | −1.00E+003 | 1.53E+003 | 2.03E+003 | −25 | 44054.31 | 47248.64 |
| TBB7_ARATH | −1.53E+003 | −1.27E+003 | 3.15E+003 | 3.72E+003 | −26 | 44339.38 | 47096.68 |
| TBB7_CAEBR | −2.49E+002 | −1.05E+003 | 1.53E+003 | 1.87E+003 | −21 | 43204.36 | 45682.33 |
| TBB7_CAEEL | −1.65E+002 | −9.89E+002 | 1.48E+003 | 1.79E+003 | −19 | 43248.82 | 45913.33 |
| TBB7_CHICK | −1.07E+003 | −1.20E+003 | 2.50E+003 | 2.97E+003 | −24 | 43586.17 | 46372.26 |
| TBB7_MAIZE | −1.62E+003 | −1.02E+003 | 3.29E+003 | 3.81E+003 | −28 | 43810.2 | 46505.18 |
| TBB8_ARATH | −1.44E+003 | −1.09E+003 | 3.25E+003 | 3.72E+003 | −25 | 44295.12 | 47021.18 |
| TBB8_MAIZE | −2.88E+002 | −1.30E+003 | 1.98E+003 | 2.39E+003 | −25 | 43821.89 | 47069.82 |
| TBB9_ARATH | −1.85E+002 | −1.19E+003 | 1.87E+003 | 2.22E+003 | −27 | 43541.37 | 46710.21 |
| TBB_ACHKL | −1.49E+003 | −1.18E+003 | 2.78E+003 | 3.37E+003 | −27 | 43582.08 | 46093.01 |
| TBB_ACRCO | −2.96E+002 | −1.68E+003 | 2.83E+003 | 3.31E+003 | −25 | 44030.34 | 47131.02 |
| TBB_AJECA | −1.90E+001 | −1.42E+003 | 1.43E+003 | 2.02E+003 | −17 | 43899.95 | 46111.64 |
| TBB_ASPFL | −1.25E+003 | −1.07E+003 | 3.51E+003 | 3.88E+003 | −23 | 43818.01 | 46347.28 |
| TBB_ASPPA | −1.09E+003 | −1.17E+003 | 3.41E+003 | 3.77E+003 | −23 | 43974.21 | 46807.66 |
| TBB_BABBO | −7.24E+001 | −9.18E+002 | 9.11E+002 | 1.30E+003 | −22 | 43389.67 | 46335.4 |
| TBB_BOMMO | −1.75E+002 | −1.61E+003 | 3.52E+003 | 3.87E+003 | −25 | 44236.29 | 47190.27 |
| TBB_BOTCI | −8.12E+001 | −1.52E+003 | 2.48E+003 | 2.91E+003 | −22 | 43733.8 | 46687 |
| TBB_CANAL | −7.66E+002 | −1.32E+003 | 2.58E+003 | 3.00E+003 | −27 | 43649.84 | 45896.27 |
| TBB_CEPAC | −6.54E+002 | −1.75E+003 | 2.46E+003 | 3.09E+003 | −24 | 43755.92 | 46590.03 |
| TBB_CHLIN | −8.12E+002 | −1.08E+003 | 2.18E+003 | 2.56E+003 | −24 | 43440.63 | 46047.48 |
| TBB_CHLRE | −7.63E+002 | −1.04E+003 | 1.67E+003 | 2.11E+003 | −24 | 43580.97 | 46513.44 |
| TBB_CICAR | −1.47E+003 | −1.26E+003 | 2.76E+003 | 3.37E+003 | −26 | 44093.85 | 46346.37 |
| TBB_DICDI | −2.34E+002 | −3.61E+002 | 2.34E+003 | 2.38E+003 | −25 | 44756.23 | 46368.54 |
| TBB_EIMTE | −8.00E+002 | −1.16E+003 | 2.38E+003 | 2.76E+003 | −24 | 43849.31 | 46691.1 |
| TBB_EPITY | −1.72E+002 | −9.30E+002 | 2.54E+003 | 2.71E+003 | −24 | 43981.99 | 47087.79 |
| TBB_ERYGR | −1.11E+003 | −1.62E+003 | 2.49E+003 | 3.17E+003 | −21 | 43521.09 | 46022.36 |
| TBB_EUGGR | −5.27E+002 | −9.96E+002 | 1.74E+003 | 2.08E+003 | −28 | 43338.8 | 45940.86 |
| TBB_EUPCR | −1.29E+003 | −1.16E+003 | 2.41E+003 | 2.97E+003 | −26 | 43733.12 | 46318.45 |
| TBB_EUPFO | −3.46E+002 | −9.23E+002 | 2.17E+003 | 2.38E+003 | −23 | 43736.75 | 46621.81 |
| TBB_EUPOC | −1.09E+003 | −1.05E+003 | 2.34E+003 | 2.79E+003 | −25 | 43474.13 | 46098.76 |
| TBB_G!ALA | −1.11E+003 | −9.79E+002 | 2.43E+003 | 2.85E+003 | −24 | 43973.16 | 47134.22 |
| TBB_GIBFU | −1.09E+003 | −1.15E+003 | 3.42E+003 | 3.76E+003 | −24 | 43717.6 | 46450.54 |
| | | | | | | | 36441.03 |
| TBB_HALDI | 2.70E+002 | −1.27E+003 | 5.88E+002 | 1.43E+003 | −5 | 33789.64 | |
| | | | | | | | F |
| TBB_HORVU | −1.62E+003 | −1.07E+003 | 3.28E+003 | 3.82E+003 | −27 | 43828.44 | 46711.06 |
| TBB_LEI ME | −4.57E+002 | −1.16E+003 | 1.79E+003 | 2.18E+003 | −25 | 43640.51 | 46103.21 |
| TBB_LYMST | −4.11E+002 | 9.15E+001 | 1.44E+003 | 1.50E+003 | −16 | 11210.57 | 12653.09F |
| TBB_LYTPI | −1.31E+003 | −6.00E+002 | 3.00E+003 | 3.33E+003 | −13 | 17813.1 | 19768.08F |
| TBB_MYCPJ | −1.06E+003 | −1.44E+003 | 3.06E+003 | 3.54E+003 | −22 | 43590.41 | 46322.14 |
| TBB_NAEGR | −9.11E+002 | −1.50E+003 | 2.96E+003 | 3.44E+003 | −26 | 44385.1 | 47524.01 |
| TBB_NEUCR | −8.67E+002 | −1.30E+003 | 3.63E+003 | 3.95E+003 | −24 | 43678.94 | 46401.01 |
| TBB_OCTDO | −7.15E+002 | −5.08E+002 | 1.86E+003 | 2.06E+003 | −23 | 44106.16 | 46618.28 |
| TBB_ONCGI | −7.02E+002 | −1.07E+003 | 2.06E+003 | 2.42E+003 | −21 | 43865.63 | 46450.72 |
| TBB_PARLI | −1.51E+003 | −1.20E+003 | 3.26E+003 | 3.78E+003 | −26 | 43883.1 | 46679.47 |
| TBB_PENDI | −4.37E+002 | −1.44E+003 | 2.26E+003 | 2.71E+003 | −21 | 43814.64 | 46891.07 |
| TBB_PESMI | −3.95E+002 | −1.50E+003 | 2.53E+003 | 2.97E+003 | −24 | 43722.64 | 46550.51 |
| TBB_PHANO | −7.61E+002 | −1.12E+003 | 2.67E+003 | 2.99E+003 | −21 | 43777.75 | 46470 |
| TBB_PHYCI | −6.90E+002 | −1.01E+003 | 1.92E+003 | 2.27E+003 | −24 | 43659.2 | 46213.31 |
| TBB_PIG | −3.59E+002 | −1.55E+003 | 1.91E+003 | 2.48E+003 | −25 | 43854.42 | 47042.18 |
| TBB_PLASA | −6.56E+002 | −1.43E+003 | 1.55E+003 | 2.21E+003 | −28 | 43731.91 | 46620.07 |
| TBB_PLAFK | −1.06E+003 | −1.24E+003 | 1.40E+003 | 2.14E+003 | −27 | 43684.84 | 46607.02 |
| TBB_PLESA | −1.51 E+003 | −1.06E+003 | 2.51E+003 | 3.12E+003 | −25 | 44047.21 | 46981.21 |
| TBB_PNECA | 5.85E+001 | −7.05E+002 | 1.77E+003 | 1.90E+003 | −22 | 43093.29 | 45488.54 |
| TBB_POLAG | −9.12E+002 | −1.12E+003 | 2.29E+003 | 2.71E+003 | −24 | 43428.91 | 45898.77 |
| TBB_PSEAM | −1.11E+003 | −1.06E+003 | 1.54E+003 | 2.18E+003 | −25 | 43784.36 | 46877.34 |
| TBBQ_HUMAN | −2.77E+002 | −7.68E+002 | 5.86E+002 | 1.00E+003 | −18 | 42440.37 | 44994.21 |
| TBB_RHYSE | −1.13E+003 | −1.49E+003 | 3.08E+003 | 3.60E+003 | −21 | 43739.88 | 46423.03 |
| TBB_SCHCO | −7.83E+002 | −1.13E+003 | 1.60E+003 | 2.11E+003 | −25 | 43970.42 | 46854.63 |
| TBB_SCHPO | −4.48E+002 | −8.91E+002 | 2.11E+003 | 2.33E+003 | −27 | 43446.86 | 45913.99 |
| | | | | | | | 31526.12 |
| TBB_STRPU | −6.17E+002 | −1.36E+003 | 3.07E+003 | 3.41E+003 | −18 | 29275.73 | |
| | | | | | | | F |
| TBB_STYLE | −9.53E+002 | −1.02E+003 | 2.15E+003 | 2.56E+003 | −24 | 43277.04 | 45763.19 |
| TBB_TETPY | −5.66E+002 | −8.36E+002 | 1.78E+003 | 2.05E+003 | −24 | 43557.91 | 46339.63 |
| TBB_TETTH | −5.22E+002 | −8.68E+002 | 1.71E+003 | 1.99E+003 | −25 | 43553.05 | 46384.46 |
| TBB_THAWE | −9.42E+002 | −1.14E+003 | 2.35E+003 | 2.78E+003 | −23 | 43337.8 | 45963.07 |
| TBB_TOXGO | −1.44E+003 | −1.21E+003 | 2.28E+003 | 2.96E+003 | −27 | 43887.58 | 46652.72 |
| TBB_TRYBR | −9.50E+001 | −1.16E+003 | 1.42E+003 | 1.84E+003 | −24 | 43475.69 | 45924.44 |
| TBB_TRYCR | −5.27E+002 | −1.06E+003 | 1.56E+003 | 1.96E+003 | −25 | 43396.83 | 45908.56 |
| TBB_VENIN | −1.12E+003 | −1.36E+003 | 3.10E+003 | 3.56E+003 | −22 | 43549.74 | 46256.71 |
| TBBX_HUMAN | −1.07E+003 | −1.20E+003 | 2.50E+003 | 2.97E+003 | −24 | 43586.17 | 46372.26 |
| TBB_YEAST | −1.38E+003 | −3.14E+002 | 3.25E+003 | 3.54E+003 | −31 | 44568.68 | 47245.65 |
| TBD_H U MAN | −2.52E+002 | −1.29E+003 | 3.67E+002 | 1.36E+003 | −5 | 44650.69 | 45579.63 |
| TBE_HUMAN | 5.31E+002 | −4.99E+002 | 4.47E+002 | 8.55E+002 | −6 | | |
| TBG1_HUMAN | 7.16E+002 | −1.58E+003 | −6.03E+002 | 1.84E+003 | −10 | 44645.36 | 45231.14 |
| TBG1 _MAIZE | 8.07E+002 | −1.90E+003 | −3.86E+002 | 2.10E+003 | −10 | 46058.94 | 46110.79 |
| TBG1 _MOUSE | 5.56E+002 | −1.71E+003 | −8.73E+002 | 2.00E+003 | −11 | 44751.95 | 45706.51 |
| TBG2_ARATH | 1.46E+003 | −2.04E+003 | 5.26E+002 | 2.56E+003 | −10 | 46598.89 | 47773.51 |
| TBG2_DROM E | 8.15E+002 | −1.58E+003 | −8.50E+002 | 1.97E+003 | −6 | 44800.18 | 45401.53 |
| TBG2_EU PCR | 3.78E+002 | −1.86E+003 | −7.45E+002 | 2.04E+003 | −15 | 45632.97 | 46882.17 |
| TBG2_EUPOC | 4.42E+001 | −2.22E+003 | −3.12E+002 | 2.24E+003 | −10 | 45771.97 | 47628.98 |
| TBG2_HUMAN | 5.46E+002 | −1.57E+003 | −3.46E+002 | 1.70E+003 | −13 | 44707.12 | 45746.7 |
| TBG2_MAIZE | 4.62E+002 | −1.85E+003 | −5.21E+002 | 1.98E+003 | −12 | | |
| TBG2_MOUSE | 3.57E+002 | −1.22E+003 | −6.91E+002 | 1.45E+003 | −10 | 44770.54 | 45966.96 |
| TBG2_ORYSA | 7.37E+002 | −1.71E+003 | −6.59E+002 | 1.97E+003 | −12 | 46151.43 | 46463.29 |
| | | | | | | | 42200.31 |
| TBG3_MAIZE | 7.36E+002 | −1.95E+003 | −1.05E+002 | 2.09E+003 | −9 | 41586.56 | |
| | | | | | | | F |
| TBG_ANEPH | 1.48E+003 | −2.35E+003 | 3.46E+002 | 2.79E+003 | −9 | 46391.54 | 47490.67 |
| TBG_CAEEL | 3.04E+002 | −1.06E+003 | −8.91E+002 | 1.42E+003 | −9 | 43944.74 | 45972.73 |
| TBG_CANAL | 1.34E+003 | −1.39E+003 | 1.90E+003 | 2.71E+003 | −23 | | |
| TBG_CHLRE | 7.24E+002 | −1.85E+003 | −3.37E+002 | 2.02E+003 | −6 | 45684.61 | 46543.6 |
| | | | | | | | 27657.99 |
| TBG_COCHE | 4.43E+002 | −8.17E+002 | −5.81E+002 | 1.10E+003 | −2 | 26054.95 | |
| | | | | | | | F |
| TBG_EMENI | 7.59E+002 | −1.72E+003 | −7.19E+002 | 2.01E+003 | −9 | 44602.99 | 46275.01 |
| TBG_ENTHI | 1.65E+002 | −9.20E+002 | −8.38E+002 | 1.26E+003 | −6 | 45398.09 | 46350.19 |
| TBG_EUPAE | 7.82E+002 | −1.99E+003 | −3.07E+002 | 2.16E+003 | −10 | 45766.71 | 47108.63 |
| TBG_NEUCR | 5.63E+002 | −1.98E+003 | −3.09E+002 | 2.08E+003 | −9 | 45255.26 | 46777.78 |
| TBG_PHYPA | 1.25E+003 | −2.49E+003 | 2.51E+001 | 2.78E+003 | −8 | 46549.14 | 47781.9 |
| TBG_PLAFO | 6.66E+002 | −2.18E+003 | −7.53E+002 | 2.40E+003 | −7 | 45179.34 | 46542.13 |
| TBG_RETFI | 1.16E+003 | −1.59E+003 | −5.16E+002 | 2.04E+003 | −4 | 47100.48 | 48598.68 |
| TBG_SCHJP | 1.95E+000 | −1.81E+003 | −6.21E+002 | 1.91E+003 | −7 | 44087.45 | 45523.53 |
| TBG_SCHPO | 3.32E+002 | −1.54E+003 | −3.58E+002 | 1.62E+003 | −8 | 43930.03 | 45423.04 |
| TBG_USTVI | 7.32E+002 | −1.61E+003 | −8.74E+002 | 1.97E+003 | −10 | 45915.36 | 47039.01 |
| TBG_XENLA | 8.58E+002 | −1.48E+003 | −8.55E+002 | 1.91E+003 | −9 | 44698.46 | 45367.78 |
| TBG_YEAST | 9.08E+002 | −1.50E+003 | 1.31E+003 | 2.19E+003 | −30 | 45777.95 | 47349.09 |

[0074] As is also disclosed in the Tuszynski paper, “FIG. 1a shows a scatter diagram of the net/charge/volume ratios of the different tubulins. This plot is striking in that the net charge on the beta-tubulins is bar far the greatest, ranging between −17 and −32 elementary charges (e) depending upon the particular beta-tubulin with an average value in this case at approximately −25 e. Next comes the alpha-tubulins whose net charges vary between −10 and 1-25 elementary charges . . . . There appears to be little if any correlation between the size of a protein and its charge . . . . Further, it should be kept in mind, that the charge on a tubulin dimmer will be neutralized in solution due to the presence of counter-ions which almost completely screen the net charge. This was experimentally determined for tubulin by the application of an external electric field; the resulting value of an unscreened charge of approximately 0.2 e per monomer was found Stracke et al. 2002.” The reference to Stracke et al. was to an article by R. Stracke, J. A. Tuszynski, et al. regarding “Analysis of the migration behaviour of single microtubules in electric fields,” Biochemical and Biophysical Research Communications, 293:606-609, 2002.

[0075] As is also disclosed in the Tuszynski paper, “What is, however, of great interest in connection with polymerization of tubulin into microtubules and with drug-protein binding is the actual distribution of charges on the surface of the tublin. FIG. 3 illustrates this for the Downing-Nogales structure with plus signs indicating the regions of positively charged and minus signs negatively charged locations. This figure shows C-termini in two very upright positions. Of course, each of the different tubulins will show differences in this regard . . . .”

[0076] As is also disclosed in the Tuszynski paper, “ . . . alpha tubulins have relatively low dipole moments about their centres-of-mass, ranging between 1000 and 2000 Debye, while the beta-tubulins are very high in this regard with the corresponding values ranging between 1000 and 4000 Debye and with the average value close to 3000 Debye . . . . In FIG. 2 we have illustrated the important aspect of dipole organization for tubulin, namely its orientation. FIG. 2a shows a Mollweide projection of dipole orientation in tubulin . . . . We conclude from this diagram and its magnification . . . that both alpha- and beta-tubulins orient their dipose moments in a direction that is close to being perpendicular to the microtubule surface . . . .”

[0077] As is also disclosed in the Tuszynski paper, “FIG. 1c shows the logarithm of surface area against the logarithm of volume for the different tubulins . . . . Note that the alpha and beta families have a very similar slope with a value close to the unity that is indicative of cylindrical symmetry in the overall geometry . . . .”

[0078] As is also disclosed in the Tuszynski paper, “Our models show that only alpha- and beta-tubulins have C-termini that project outwards from the tubulin, due to their high negative charges. FIG. 5 shows the energy levels of different orientational positons of the C-termini in a toy model and suggests that there is relatively little energetic difference between projecting straight outward from the rest of the tublin and lying on the surface of tubulin in certain energy minima . . . .”

[0079] As is also disclosed in the Tuszynski et al. paper, “Isotype composition has a demonstrable effect on microtubule assembly kinetics (Panda et al., 1994).” The Panda et al. reference was an article by D. Panda et al. on “Microtubule dynamics in vitro are regulated by the tubulin isotype composition,” Proc. Natl. Acad. Sci. USA 91: 11 358-11 362, 1994.

[0080] As is also disclosed in the Tuszynski paper, “This could be due to changes in the electrostatics of tubulin, which although significantly screened by counter-ions does affect microtubule assembly by influencing dimer-dimer interactions over relatively short distances (approximately 5 nm) as well as the kinetics of assembly. These short-range interactions have recently been studied by Sept et al. (2003) by calculating the energy of protofilament-protofilament interactions. These authors concluded from their work that the two types of microtubule lattices (A and B) correspond to the local energy minima.” The Sept et al. reference was to an article by D. Sept et al., “The physical basis of microtubule structure and stability,” Protein Science, 12:2257-2261, 2003.

[0081] As is also disclosed in the Tuszynski paper, “The dipole moment could play a role in microtubule assembly and in other processes. This could be instrumental in the docking process of molecules to tubulin and in the proper steric configuration of a tubulin dimer as it approaches a microtubule for binding. An isolated dimer has an electric field dominated by its net charge . . . . In contrast, a tubulin dimer . . . surrounded by water molecules and counter-ions, as is physiologically relevant, has an isopotential surface with two lobes much like the dumbbell shape of a mathematically dipole moment. The greater the dipole of each of its units is, the less stable the microtubule since dipole-dipole interactions provide a positive energy disfavoring a microtubule structure. Note that the strength of the interaction potential is proportional to the square of the dipole moment, hence microtubule structures formed from tubulin units with larger dipoles momements should be more prone to undergo disassembly catastrophes compared to those microtubes that contain low dipole moment tubulins. For organisms that express more than one type of tubulin isotype in the same cell, one can conceive that microtubule dynamic behavior could be regulated by altering the relative amounts of the different isotypes according to their dipole moments.”

[0082] As is also disclosed in the Tuszynski paper, “In terms of surface/volume ratios, α- and β-tubulin are the least compact, while γ, δ and ε are the most compact. There is abundant evidence that both αand β have flexible conformations. This is attested to by their interaction with drugs and is consistent with the dynamic instability of microtubules. In contrast, there is as yet no evidence of dynamic instability in γ, δ and ε partcipating in dynamic instability, nor is there any theoretical reason to imagine such flexibility. It is reasonable to postulate that a less compact structure may have a more flexible conformation.”

[0083] As is also disclosed in the Tuszynski et al. paper, “Our models predict that the C-termini of α and β can readily adopt the two extreme conformations: either projecting outwards from the tubulin (and the microtubule surface) or to lie on the surface, albeit such that their charged residues can form electrostatic bonds with complimentary charges on the surface. The state of the C-terminus (upright, down, or in intermediate states) down) is easily influenced by the local ion concentration including pH. This conformational complexity has many implications (Pal et al., 2001).” The Pal et al. reference is an article by D. Pal et al. on “Conformational properties of alpha-tubulin tail peptide: implications for tail-body interaction,” Biochemistry, 40: 15 512-15 519, 2001.

[0084] As is also disclosed in the Tuszynski paper, “First, a projecting C-terminus could play a major role in signaling. The fact that tubulin isotypes differ markedly in the C-termini suggests that specific sequences may mediate the functional roles of the isotypes. These sequences would be readily available for interactions with other proteins in a projecting C-terminus. Second, the C-termini are the sites of many of the post-translational modifications of tubulin—polyglutamylation, polyglycylation, detyrosinolation/tyrosinolation, removal of the penultimate glutamic acid, and phosphorylation of serine and tyrosine (Redeker et al., 1998).” The Redeker et al. reference was an article by V. Redekere et al. on “Posttranslational modifications of the C-terminus of alpha-tubulin in adult rat brain: alpha 4 is glutamylated at two residues,” Biochemistry, 37: 14 838-14 844, 1998.

[0085] As is also disclosed in the Tuszynski paper, “It is known that the C-termini are essential to normal microtubule function (Duan and Gorovsky, 2002); a projecting C-terminus would be easily accessible to enzymes that affect these modifications and also the modification could influence the likelihood of the C-terminus changing conformation. In addition, if the modification plays a role in signaling then the signal would be readily available in a projecting C-terminus, as already mentioned.” The reference to Duan and Gorovsky is to an article by J. Duan et al., “Both carboxy-termianl tails of alpha- and beta-tubulin are essential, but either one will suffice,” Current Biology, 12:313-316, 2002.

[0086] As is also disclosed in the Tuszynski et al. paper, “Third, projecting C-termini would automatically create spacing between microtubules. It is known that microtubules are never closely packed and are surrounded by what is referred to as an exclusion zone (Dustin, 1984).” The reference to Dustin is to a book by P. Dustin on “Microtubules (Springer-Verlag, Berlin, 1984).

[0087] As is also disclosed in the Tuszynski paper, “This is a region of space around them that strongly disfavors the presence of other microtubules in the vicinity. Although MAPs could play a role in such spacing, electrostatic repulsion among C-terminal ends are likely to influence this as well. The C-termini are the major sites of binding of the MAPs to tubulin. A projecting C-terminus may facilitate MAP binding and, conversely, MAP binding could influence the conformation of the C-terminus. Evidence for this is provided by the work of Makridis et al who showed that when tau binds to microtubules, it triggers a structural change on the microtubule surface whereby a structural element, presumably tau, lies along the surface of the microtubule forming a lattice whose alingement angle is much sharper than that of the tubulin subunits. This lattice is presumably superimposed on top of the normal microtubule (A or B) lattice. The orientation of the C-termini when they are lying on the surface of the microtubule form exactly the same kind of lattice that (Makridis et al, 2003) observed, a striking confirmation of the potential accuracy of our modeling . . . . These results raise the possibility that the orientation of the C-termini of the alpha and beta subunits determines the arrangement of tau molecules on the microtubule.” The Makrides reference referred to is an article by V. Markrides et al., “Microtubule-dependent oligomerization of tau: Implicatons for physiological tau function and tauopathies,” J. Biol. Chem., 278:33 298-33 304, 2003.

[0088] As is also disclosed in the Tuszynski et al. paper, “ . . . the state of the C-termini could mediate how motor proteins such as kinesin bind to and move on microtubules. Our models show that kinesin can only bind to upright C-termini . . . and not to C-termini lying on the surface of the microtubule . . . . Very minor changes in the local ionic environment or the pH could halt the progress of kinesin by collapsing the C-termini. One can postulate that the proportion of C-termini that are in the upright conformation in a given portion of the microtubule could determine the actual rate of kinesin movement. It is likely that such arguments could apply to other motor proteins as well. One might imagine that the very fine coordination of movements that occur in processes such as mitosis could be influenced or even caused by the conformational state of the C-termini in particular areas of the microtubule.”

[0089] As is also disclosed in the Tuszynski paper, “Finally, one can imagine that the C-termini could collapse in waves that could simultaneously move a wave of ions that could polarize or depolarize a membrane. This could be a form of microtubule signaling that has not yet been considered. A quantitative model of ionic wave transmission coupled to co-ordinated motion of the C-termini of dendritic microtubules has been recently developed by Priel et al . . . .” The reference to Priel et al. was to an article by A. Priel et al. entitled “Molecular Dynamics of C-termini in Tubulin: Implications for Transport to Active Synapsis,” submitted to Biophys. J., 2003.

[0090] Table 1 of the Tuszynksi paper disclosed the tubulin sequences used in the study reported in the article. In such Table 1, the table names the names the source organism, and for each α, β, γ, δ, and ε, gives the name used in the databank.

The Use of Particular Models of Isotypes of Tubulin for Drug Development

[0091] In one embodiment of the invention, once a particular tubulin isotype has been identified as being of interest, and once a three-dimensional model of it has been made in accordance with the process of this invention, this model may then be used to identify which drug or drugs would most advantageously interact with the binding sites of the tubulin isotype in question.

[0092] The preferred binding sites which may be used in the process of identifying the candidate drugs are discussed in the next section of this specification.

Preferred Binding Sites of Tubulin Isotypes

[0093] It is known that many chemotherapeutic drugs effect their primary actions by inhibiting tubulin polymerization. Thus, as is disclosed in U.S. Pat. No. 6,162,930 (the entire disclosure of which is hereby incorporated by reference into this specification), “An aggressive chemotherapeutic strategy toward the treatment and maintenance of solid-tumor cancers continues to rely on the development of architecturally new and biologically more potent anti-tumor, anti-mitotic agents. A variety of clinically-promising compounds which demonstrate potent cytotoxic and anti-tumor activity are known to effect their primary mode of action through an efficient inhibition of tubulin polymerization (Gerwick et al.). This class of compounds undergoes an initial binding interaction to the ubiquitous protein tubulin which in turn arrests the ability of tubulin to polymerize into microtubules which are essential components for cell maintenance and cell division (Owellen et al.).”

[0094] U.S. Pat. No. 6,162,930 also discloses that the precise means by which the cytotoxic agents “ . . . arrests the ability of tubulin to polymerize . . . ” is unknown, stating that: “Currently the most recognized and clinically useful tubulin polymerization inhibitors for the treatment of cancer are vinblastine and vincristine (Lavielle, et al.). Additionally, the natural products rhizoxin (Nakada, et al., 1993a and 1993b; Boger et al.; Rao et al., 1992 and 1993; Kobayashi et al., 1992 and 1993) combretastin A-4 and A-2 (Lin et al.; Pettit, et al., 1982, 1985, and 1987) and taxol (Kingston et al.; Schiff et al; Swindell, et a, 1991; Parness, et al.) as well as certain synthetic analogues including the 2-styrylquinazolin-4(3H)-ones (SQO) (Jiang et al.) and highly oxygenated derivatives of cis- and trans-stilbene (Cushman et al.) and dihydrostilbene are all known to mediate their cytotoxic activity through a binding interaction with tubulin. The exact nature of this interaction remains unknown and most likely varies somewhat between the series of compounds.”

[0095] U.S. Pat. No. 6,512,003 also discusses the “ . . . nature of this unknown interaction . . . ,” stating that (at column 1) “Novel tubulin-binding molecules, which, upon binding to tubulin, interfere with tubulin polymerization, can provide novel agents for the inhibition of cellular proliferation and treatment of cancer.” U.S. Pat. No. 6,512,003 presents a general discussion of the role of tubulin in cellular proliferation, disclosing (also at colum1) that: Cellular proliferation, for example, in cancer and other cell proliferative disorders, occurs as a result of cell division, or mitosis. Microtubules play a pivotal role in mitotic spindle assembly and cell division . . . . These cytoskeletal elements are formed by the self-association of the ad tubulin heterodimers . . . . Agents which induce depolymerization of tubulin and/or inhibit the polymerization of tubulin provide a therapeutic approach to the treatment of cell proliferation disorders such as cancer. Recently, the structure of the .alpha.β tubulin dimer was resolved by electron crystallography of zinc-induced tubulin sheets . . . . According to the reported atomic model, each 46×40×65 .ANG tubulin monomer is made up of a 205 amino acid N-terminal GTP/GDP binding domain with a Rossman fold topology typical for nucleotide-binding proteins, a 180 amino acid intermediate domain comprised of a mixed β sheet and five helices which contain the taxol binding site, and a predominantly helical C-terminal domain implicated in binding of microtubule-associated protein (MAP) and motor proteins . . . .”

[0096] U.S. Pat. No. 6,512,003 also teaches that the binding site of vinca alkaloids to tubulin differs from the binding site of colchicin to tublin, stating (also at column 1) that: “Spongistatin (SP) . . . is a potent tubulin depolymerizing natural product isolated from an Eastern Indian Ocean sponge in the genus Spongia . . . Spongistatins are 32-membered macrocyclic lactone compounds with a spongipyran ring system containing 4 pyran-type rings incorporated into two spiro[5.5]ketal moieties . . . . In cytotoxicity assays, spongistatin (SP) exhibited potent cytotoxicity with subnanomolar IC50 values against an NCI panel of 60 human cancer cell lines . . . . SP was found to inhibit the binding of vinc alkaloids (but not colchicin) to tubulin . . . , indicating that the binding site for this potent tubulin depolymerizing agent may also serve as a binding region for vinc alkaloids.”

[0097] U.S. Pat. No. 6,593,374, the entire disclosure of which is hereby incorporated by reference into this specification, presents a “working hypothesis” that the “ . . . methoxy aryl functionality . . . ” is especially important for binding at the colchicin binding site. It discloses (at columns 1-2 thereof) that: “An important aspect of this work requires a detailed understanding, on the molecular level, of the ‘small molecule’ binding domain of both the alpha. and β subunits of tubulin. The tertiary structure of the .alpha., β tubulin heterodimer was reported in 1998 by Downing and co-workers at a resolution of 3.7 .ANG. using a technique known as electron crystallography . . . . This brilliant accomplishment culminates decades of work directed toward the elucidation of this structure and should facilitate the identification of small molecule binding sites, such as the colchicine site, through techniques such as photoaffinity and chemical affinity labeling . . . . We have developed a working hypothesis suggesting that the discovery of new antimitotic agents may result from the judicious combination of a molecular template (scaffold) which in appropriately substituted form (ie. phenolic moieties, etc.) interacts with estrogen receptor (ER), suitably modified with structural features deemed imperative for tubulin binding (arylalkoxy groups, certain halogen substitutions, etc.). The methoxy aryl functionality seems especially important for increased interaction at the colchicine binding site in certain analogs . . . . Upon formulation of this hypothesis concerning ER molecular templates, our initial design and synthesis efforts centered on benzo[b]thiophene ligands modeled after raloxifene, the selective estrogen receptor modulator (SERM) developed by Eli Lilly and Co . . . . Our initial studies resulted in the preparation of a very active benzo[b]thiophene-based antitubulin agent . . . . In further support of our hypothesis, recent studies have shown that certain estrogen receptor (ER) binding compounds as structurally modified estradiol congeners (2-methoxyestradiol, for example) interact with tubulin and inhibit tubulin polymerization . . . . Estradiol is, of course, perhaps the most important estrogen in humans, and it is intriguing and instructive that the addition of the methoxy aryl motif to this compound makes it interactive with tubulin. It is also noteworthy that 2-methoxyestradiol is a natural mammalian metabolite of estradiol and may play a cell growth regulatory role especially prominent during pregnancy. The term ‘phenolic moiety’ means herein a hydroxy group when it refers to an R group on an aryl ring.”

[0098] As is also disclosed in U.S. Pat. No. 6,593,374 (at column 1 thereof), “Tubulin is currently among the most attractive therapeutic targets in new drug design for the treatment of solid tumors. The heralded success of vincristine and taxol along with the promise of combretastatin A-4 (CSA-4) prodrug and dolastatin . . . to name just a few, have firmly established the clinical efficacy of these antimitotic agents for cancer treatment. An aggressive chemotherapeutic strategy toward the treatment and maintenance of solid-tumor cancers continues to rely on the development of architecturally new and biologically more potent anti-tumor, anti-mitotic agents which mediate their effect through a direct binding interaction with tubulin. A variety of clinically-promising compounds which demonstrate potent cytotoxicity and antitumor activity are known to effect their primary mode of action through an efficient inhibition of tubulin polymerization . . . . This class of compounds undergoes an initial interaction (binding) to the ubiquitous protein tubulin which in turn arrests the ability of tubulin to polymerize into microtubules which are essential components for cell maintenance and division . . . . During metaphase of the cell cycle, the nuclear membrane has broken down and the cytoskeletal protein tubulin is able to form centrosomes (also called microtubule organizing centers) and through polymerization and depolymerization of tubulin the dividing chromosomes are separated. Currently, the most recognized and clinically useful members of this class of antimitotic, antitumor agents are vinblastine and vincristine . . . along with taxol . . . . Additionally, the natural products rhizoxin, . . . combretastatin A-4 and A-2, . . . curacin A, . . . podophyllotoxin, . . . epothilones A and B, . . . dolastatin 10 . . . and welwistatin . . . (to name just a few) as well as certain synthetic analogues including phenstatin, . . . the 2-styrylquinazolin-4(3H)-ones (SQO), . . . and highly oxygenated derivatives of cis- and trans-stilbene . . . and dihydrostilbene are all known to mediate their cytotoxic activity through a binding interaction with tubulin. The exact nature of this binding site interaction remains largely unknown, and definitely varies between the series of compounds.”

[0099] Published United States patent application 2004/0044059, the entire disclosure of which is hereby incorporated by reference into this specification, also discloses the uncertainty that exists with regard to the “ . . . tubulin binding site interactions . . . ” At page 1 thereof, it states that: “The exact nature of tubulin binding site interactions remain largely unknown, and they definitely vary between each class of Tubulin Binding Agent. Photoaffinity labeling and other binding site elucidation techniques have identified three key binding sites on tubulin: 1) the Colchicine site (Floyd et al, Biochemistry, 1989; Staretz et al, J. Org. Chem., 1993; Williams et al, J. Biol. Chem., 1985; Wolff et al, Proc. Natl. Acad. Sci. U.S.A., 1991),2) the Vinca Alkaloid site (Safa et al, Biochemistry, 1987), and 3) a site on the polymerized microtubule to which taxol binds (Rao et al, J. Natl. Cancer Inst., 1992; Lin et al, Biochemistry, 1989; Sawada et al, Bioconjugate Chem, 1993; Sawada et al, Biochem. Biophys. Res. Commun., 1991; Sawada et al, Biochem. Pharmacol., 1993). An important aspect of this work requires a detailed understanding, at the molecular level, of the ‘small molecule’ binding domain of both the α and β subunits of tubulin. The tertiary structure of the α,β tubulin heterodimer was reported in 1998 by Downing and co-workers at a resolution of 3.7 using a technique known as electron crystallography (Nogales et al, Nature, 1998). This brilliant accomplishment culminates decades of work directed toward the elucidation of this structure and should facilitate the identification of small molecule binding sites, such as the colchicine site, using techniques such as photoaffinity and chemical affinity labeling (Chavan et al, Bioconjugate Chem., 1993; Hahn et al, Photochem. Photobiol., 1992).”

[0100] As is also disclosed in published United States patent application 2004/0044059, “The cytoskeletal protein tubulin is among the most attractive therapeutic drug targets for the treatment of solid tumors. A particularly successful class of chemotherapeutics mediates its anti-tumor effect through a direct binding interaction with tubulin. This clinically-promising class of therapeutics, called Tubulin Binding Agents, exhibit potent tumor cell cytotoxicity by efficiently inhibiting the polymerization of αβ-tubulin heterodimers into the microtubule structures that are required for facilitation of mitosis or cell division (Hamel, Medicinal Research Reviews, 1996) . . . . Currently, the most recognized and clinically useful antitumor agents are Vinca Alkaloids, such as Vinblastine and Vincristine (Owellen et al, Cancer Res., 1976; Lavielle et al, J. Med. Chem., 1991) along with Taxanes such Taxol (Kingston, J. Nat. Prod., 1990; Schiff et al, Nature, 1979; Swindell et al, J. Cell Biol., 1981). Additionally, natural products such as Rhizoxin (Nakada et al, Tetrahedron Lett., 1993; Boger et al, J. Org. Chem., 1992; Rao, et al, Tetrahedron Lett., 1992; Kobayashi et al, Pure Appl. Chem., 1992; Kobayashi et al, Indian J. Chem., 1993; Rao et al, Tetrahedron Lett., 1993), the Combretastatins (Lin et al, Biochemistry, 1989; Pettit et al, J. Nat. Prod., 1987; Pettit et al, J. Org. Chem., 1985; Pettit et al, Can. J. Chem., 1982; Dorr et al, Invest. New Drugs, 1996), Curacin A (Gerwick et al, J. Org. Chem., 59:1243, 1994), Podophyllotoxin (Hammonds et al, J. Med. Microbiol, 1996; Coretese et al, J. Biol. Chem., 1977), Epothilones A and B (Nicolau et al., Nature, 1997), Dolastatin-10 (Pettit et al, J. Am. Chem. Soc., 1987; Pettit et al, Anti-Cancer Drug Des., 1998), and Welwistatin (Zhang et al, Molecular Pharmacology, 1996), as well as certain synthetic analogues including Phenstatin (Pettit G R et al., J. Med. Chem., 1998), 2-styrylquinazolin-4(3H)-ones (“SQOs”, Jiang et al, J. Med. Chem., 1990), and highly oxygenated derivatives of cis- and trans-stilbene and dihydrostilbene (Cushman et al, J. Med. Chem., 1991) are all known to mediate their tumor cytotoxic activity through tubulin binding and subsequent inhibition of mitosis.”

[0101] As is also disclosed in published United States patent application 2004/0044059, “Normally, during the metaphase of cell mitosis, the nuclear membrane has broken down and tubulin is able to form centrosomes (also called microtubule organizing centers) which facilitate the formation of a microtubule spindle apparatus to which the dividing chromosomes become attached. Subsequent polymerization and depolymerization of the spindle apparatus mitigates the separation of the daughter chromosomes during anaphase such that each daughter cell contains a full complement of chromosomes. As antiproliferatives or antimitotic agents, Tubulin Binding Agents exploit the relatively rapid mitosis that occurs in proliferating tumor cells. By binding to tubulin and inhibiting the formation of the spindle apparatus in a tumor cell, the Tubulin Binding Agent can cause significant tumor cell cytotoxicity with relatively minor effects on the slowly-dividing normal cells of the patient.”

[0102] An article by Mary Ann Jordan et al., entitled “Microtubules as a target for anticancer drugs,” appeared in Nature Reviews/Cancer, Volume 4, April 2004, pages 253-266. At page 253 of this article, it was disclosed that: “Microtubles are extremely important in the process of mitosis . . . . Their importance in mitosis and cell division makes microtubles an important target for anticancer drugs. Microtubules and their dynamics are the targets of a chemically diverse group of antimitotic drugs (with various tubulin-binding sites) that have been used with great success in the treatment of cancer . . . . In view of the success of this class of drugs, it has been argued that microtubules represent the best cancer target to be identified so far . . . .”

[0103] The polymerization dynamics of microtubules are discussed at pages 254 et seq. of the Jordan paper, wherein it is disclosed that: “The polymerization if microtubules occurs by a nucleation-elongation mechanism in which the relatively slow formation of a short microtubule ‘nucleus’ is followed by rapid elongation of the microtubule at its ends by the reversible, non-covalent addition of tubulin dimers . . . . It is important to emphasize that microtubues are not simple equilibrium polymers. The show complex polymerization dynamics that use energy provided by the hydrolysis of GTP at the time that tubulin with bound GTP adds to the microtubule ends; these dynamics are crucial to their cellular functions.”

[0104] The Jordan et al. article also discloses that: “ . . . the correct movements of the chromosomes and their proper segregation to daughter cells require extremely rapid dynamics, making mitosis exquisitely sensitive to microtubule-targeted drugs.”

[0105] The Jordan et al. article also discloses that: “The biological functions of microtubules in all cells are determined and regulated in large part by their polymerization dynamics . . . . Microtubules show two kinds of non-equilibrium dynamics, both with purified microtubule systems in vitro and in cells.”

[0106] The Jordan et al. article also discloses (at page 257, “Box 1”) how one may measure microtubule dynamic instability. It states that: “With purified microtubules in vitro (generally purified from pig, cow, or sheep brains, which are a rich source of microtubules), dynamic instability of individual microtubules is measured by computer-enhanced time-lapse differential interference contrast microscopy. In living cells, individual fluorescent microtubules can be readily visualized in the thin peripheral regions of the cells after microinjection of fluorescent tubulin or by expression of GFP (green fluorescent protein) labeled tubulin. The growing and shortening dynamics of the microtubules, which are prominent in this region of interphase cells, are recorded by time-lapse using a sensitive CCD (charge-coupled device) camera. To determine how microtubule length changes with time, both in vitro and in living cells, the ends of the individual growing and shortening microtubules are traced by a cursor on succeeding time-lapse frames, recorded, and their rates, lengths, and durations of growing and shortening are calculated from the sequence of record x−=y positons of the microtubule ends.”

[0107] The “dynamic instability” phenomenon is discussed at page 254 of the Jordan et al. article, wherein it is disclosed that: “One kind of dynamic behavior that is highly prominent in cells, called ‘dynamic instability,’ is a process in which the individual microtubule ends switch between phases of growth and shortening . . . . The two ends of a microtubule are not equivalent: one end, called the plus end, grows and shortens more rapidly and more extensively than the other (the minus end).The microtubules undergo relatively long periods of slow lengthening, brief periods of rapid shortening, and periods of attenuated dynamics or pause, when the microtubules neither grow nor shorten detectably . . . . Dynamic instability is characterized by four main variables: the rate of microtubule growth; the rate of shortening; the frequency of transition from the growth or paused state to shortening (this transition is called a ‘catastrophe’); and the frequency of transition from shortening to growth or pause (called a ‘rescue’). Periods of pause are defined operationally, when any changes in microtubule length that might be occurring are below the resolution of the light microscope. The variable called ‘dynamicity’ is highly useful to describe the overall visually detectable rate of exchange of tubulin dimmers with microtubule ends.”

[0108] The Jordan et al. article also discloses that: “The second dynamic behavior, called ‘treadmilling’ . . . is net growth at one microtubule end and balanced net shortening at the opposite end . . . . It involves the intrinsic flow of tubulin subunits from the plus end of the microtubule to the minus end and is created by differences in the critical subunit concentrations at the opposite microtubule ends. (The critical subunit concentrations are the concentrations of the free tubulin subunits in equilibrium with the microtubule ends.). This behavior occurs in cells as well as in vitro and might be particularly important in mitosis . . . . Treadmilling and dynamic instability are compatible behaviours, and a specific microtubule population can show primary treadmilling behavior, dynamic instability behaviour, or some mixture of both. The mechanisms that control one or the other behavior are poorly understood but probably involve the tubulin isotype composition of the microtubule population, the degree of post-translational modification of tubulin, and, especially, the actions of regulatory proteins.” Applicants believe that, by causing the combination of one or more particular tubulin isotypes with a candidate therapeutic agent, one may affect the treadmilling behaviour and/or the dynamic instability behaviour of the microtubules which comprise the tubulin isotype.” In particular, they believe that the magnetic anti-mitotic compound of their invention affects the treadmilling behavior and/or the dynamic instability behavior of microtubules.

[0109] As is disclosed on page 263 of the Jordan et al. article, a comprehensive review of tubulin isotypes and post-translational modifications is presented in an article by R. F. Luduena, “Multiple forms of tubulin: different gene products and covalent modifications,” Int. Rev. Cytology, 170: 207-275 (1998). The Jordan et al. article also refers to a work by P. Verdier-Pinard et al., “Direct analysis of tubulin expression in cancer cell lines by electrospray ionization mass spectrometery,” Biochemistry, 42: 12019-12027 (2003). According to the Jordan et al. article, “The Verdier-Pinard et al. article describes analyses of tubulin isotypes, mutations, and post-translational modifications by liquid chromatography/electrospray-ionization mass spectrometry in paclitaxel-sensitive and resistant cell lines.”

[0110] Referring again to the Jordan et al. article, it is disclosed that: “Dynamic instability and treadmilling behaviours can both be observed with purified microtubules in vitro. However, the rate and extent of both treadmilling and dynamic instability are relatively slow with purified microtubules compared with rates in cells. It is clear that microtubule dynamics in cells are regulated by a host of mechanisms: cells can alter their expression levels of 13 tubulin isotypes; they can alter their levels of tubulin post-translational modifications; they can express mutated tubulin; and they can alter the expression and phosphorylation levels of microtubule-regulatory proteins . . . that interact with the microtubule surfaces and ends. Although microtubule dynamics can be modulated by the interaction of regulatory molecules with soluble tubulin itself, the assembled microtubule is likely to the primary target of cellular molecules that regulate microtubule dynamics. The many drugs that modulate microtubule dynamics might be mimicking the actions of the numerous natural regulators that control microtubule dynamics in cells.” Applicants believe that the magnetic anti-mitotic compound of their invention is as effective as is paclitaxel in “ . . . mimicking the actions of the numerous natural regulators that control microtubule dynamics in cells . . . .”

[0111] At page 255 of the Jordan et al. article, the authors disclose that “Microtubule dynamics are crucial to mitosis . . . . With the development of sophisticated methods for observing microtubule dynamics in living cells, it is now possible to visualize the dynamics of mitotic spindle microtubules. With these advances it has become clear that microtubles in mitotic spindles have uniquely rapid dynamics that are crucial to successful mitosis. During interphase, microtubules turn over (exchange their tubulin with the soluble tubulin pool) relatively slowly, with half-times that range from several minutes to several hours . . . . The interphase microtubule network disassembles at the onset of mitosis and is replaced by a new population of spindle microtubules that are 4-100 times more dynamic than the microtubules in the interphase cytoskeleton. Although there is variation among the various spindle-microtubule subpopulations, mitotic-spindle microtubules exchange their tubulin with tubulin in the soluble pool rapidly with half-times on the order of 10-30 seconds . . . . At least in some cells, the increase in dynamics seems to result from an increase in the catastrophe frequency, and a reduction in the rescue frequency rather than from changes in the inherent rate of growth and shortening.”

[0112] At page 256 of the Jordan et al. article, a “Table 1” is presented regarding “Antimitotic drugs, their diverse binding sites on tubulin and their stages of clinical development.” As is disclosed in such Table 1, one of the well-known binding domains on tubulin is the “vinca domain.”

[0113] One drug that binds at the vinca domain is Vinblastine (Velban), which is used to treat Hodgkins disease and testicular germ cell cancer. Reference may be had, e.g., to articles by G. C. Na et al. (“Thermodynamic linkage between tubulin self-association and the binding of vinblastine,” Biochemistry, 19: 1347-1354, 1980; and “Stoichiometry of the vinblastine self-induced self-association of calf-brain tubulin,” Biochem. Soc. Trans., 8: 1347-1354, 1980), by S. Lobert et al. (in Methods in Enzymology, Vol. 323, [ed. Johnson M.] 77-103 [Academic Press 2000]), and by A. Duflos et al. (“Novel aspects of natural and modified vinca alkaloids,” Curr. Med. Chem. Anti-Canc. Agents, 2: 55-70, 2002).

[0114] Another drug that binds at the vinca domain is Vincristine (Oncovin); it is used to treat leukemia and lymphomas. Reference may be had, e.g., to works by G. L. Plosker et al. (“Rituximab: a review of its use in non-Hodgkins lymphoma and chronic leukemia,” Drugs, 63: 803-843, 2003), by A. B. Sandler (“Chemotherapy for small cell lung cancer,” Semin. Oncol., 30: 9-25, 2003), and by J. O. Armitage et al. (“Overview of rational and individualized therapeutic strategies for non-Hodgkin's lymphoma,” Clin. Lymphoma, 3: S5-S11, 2002).

[0115] Another drug that binds at the vinca domain is Vinorelbine (Navelbine), which is used to treat sold tumors, lymphomas and lung cancer. Reference may be had, e.g., to works by J. Jassem et al. (“Oral vinorelbine in combination with cisplatin, a novel active regimen in advanced non-small-cell lung cancer,” Ann. Oncol. 14: 1634-1639, 2003), by A. Rossi et al. (“Single agent vinorelbine as first-line chemotherapy in elderly patients with advanced breast cancer,” Anticancer Res., 23: 1657-1664, 2003), and by A. D. Seidman (“Monotherapy options in the management of metastatic breast cancer,” Semin. Oncol., 30: 6-10, 2003).

[0116] Another drug that binds at the vinca domain is Vinflunine, which is used to treat bladder cancer, non-small-cell lung cancer, and breast cancer. Reference may be had to, e.g., the aforementioned article by A. Duflos et al., and to an article by T. Okouneva et al. on “The effects of vinflunine, vinorelbine, and vinblastine on centromere dynamics,” Cancer Ther., 2: 4.27-4.36, 2003.

[0117] Another drug that binds to the vinca domain is cryptophycin 52, and it is used to treat solid tumors. Reference may be had, e.g., to articles by D. Panda et al. (“Interaction of the antitumor compound cryptophycin 52 with tubulin,” Biochemistry, 39: 14121-14127, 2000), and by K. Kerksiek et al. (“Interaction of cryptophycin with tubulin and microtubules,” FEBS Lett., 377: 59-61, 1995).

[0118] A class of drugs that binds to the vinca domain of tubulin is the halichondrins (such as, e.g., E7389). Reference may be had, e.g., to articles by M. A. Jordan (“Mechanism of action of antitumor drugs that interact with microtubules and tubulin,” Curr. Med. Chem Anti-Cancer. Agents, 2: 1-17, 2002), by R. B. Bai et al. (“Halichondrin B and homohalichondrin B, marine natural products binding in the Vinca domain of tubulin. Discovery of tubulin-based mechanism of action by analysis of differential cytotoxity data,” J. Biol. Chem., 266: 15882-15889, 1991), by R. F. Luduena et al. (“Interaction of halichondrin B and homohalichondrin B with bovine brain tubulin,” Biochem. Pharmcol., 45: 4.21-4.27, 1993), and by M. J. Towle et al. (in vitro and in vivo anticancer activities of synthetic macrocyclic ketone analogs of halichondrin B, Cancer Res., 61: 1013-1021, 2001).

[0119] Another class of drugs that bind to the vinca domain are the dolastatins (such as TZT-1027), which are used as a vascular targeting agent. Reference may be had, e.g., to an article by E. Hamel, “Natural products which interact with tubulin in the Vinca domain: maytarsine, rhizoxin, phomopsin A. Dolostatins 10 and 15 and halichondrin B.,” Pharmacol. Ther., 55:31-51, 1992.

[0120] Another class of drugs that bind to the vinca domain is the hemiasterlins (such as HTI-286). Reference may be had, e.g., to articles by R. Bai et al. (“Interactions of the sponge-derived antimitotic antipeptide hemiasterin with tubulin: comparison with dolastatin 10 and cryptophycin 1,” Biochemistry, 38: 14302-14310, 1999), and by F. Loganzo et al. (“HTI-286, a synthetic analogue of the tripeptide hemiasterin, is a potent antimicrotubule agent that circumvents P-glycoprotein-mediated resistance in vitro and in vivo,” Cancer Res., 63: 1838-1845, 2003).

[0121] Another of the binding sites mentioned in the 2004 Jordan et al. article (see Table 1) is the colchicine domain. One of the drugs that binds in the colchicine domain is colchicine, and it is used to treat non-neoplastic diseases such as gout and familial Mediterranean fever. Reference may be had, e.g., to articles by S. B. Hastie (“Interactions of colchicines with tubulin,” Pharmacol. Ther., 512: 377-401, 1991), and by D. Skoufias et al., “Mechanism of inhibition of microtubule polymerization by colchicines inhibitory potencies of unliganded colchicine and tubulin-colchicine complexes,” Biochemistry, 31: 738-746, 1992.

[0122] The combretastatins (AVE8062A, CA-1-P, CA-4-P, N-acetylcolchicinol-O-phosphate, ZD6126) are another class of drugs that bind at the colchicines binding site. Reference may be had to articles by G. M. Tozer et al. (“The biology of the combretastatins as tumor vascular targeting agent,” Int. J. Exp. Pathol., 83: 21-38, 2002), and by E. Harnel et al. (“Antitumor 2,3-dihydro-2-(aryl)-4(1H) quinazolinone derivatives: interactions with tubulin,” Biochem. Pharmacol., 51: 53-59, 1996).

[0123] Another class of drugs that bind to the colchicines domain is the methoxybenzene-sulphonamides (such as ABT-751, E7010, etc.) that are used to treat solid tumors. Reference may be had, e.g., to an article by K. Yoshimatsu et al., “Mechanism of action of E7010, an orally active sulfonamide antitumor agent: inhibition of mitosis by binding to the colchicines site of tubulin,” Cancer Res., 57: 3208-3213, 1997).

[0124] As is also disclosed in Table 1 of the 2004 M. A. Jordan et al. article, the taxane site is another well known tubulin binding site. Taxanes (such as paclitaxel) bind at this site and are used to treat ovarian cancer, breast cancer, lung cancer, Kaposi's sarcoma, and many other tumors. Reference may be had, e.g., to articles by S. B. Horwitz (“How to make taxol from scratch,” Nature, 367: 593-594, 1994), by J. Manfredi et al. (“Taxol binds to cell microtubules,” J. Cell. Biol., 94: 688-696, 1982), by J. Parness et al. (“Taxol binds to polymerized tubulin in vitro,” J. Cell. Biol., 91: 479-487, 1981), and by J. F. Diaz et al. (“Assembly of purified GDP-tubulin into microtubules induced by taxol and taxotere: reversibility, ligand stoichiochemistry, and competition,” Biochemistry, 32: 2747-2755, 1993.).

[0125] Docetaxel (Taxotere) is another drug that binds to the taxane site; and it is used to treat prostrate, brain, and lung tumors. Reference may be had, e.g., to articles by C. P. Belani et al. (“TAX 326 Study Group: First-line chemotherapy for NSCLC: an overview of relevant trials,” Lung Cancer, 38 (Suppl. 4): 13-19, 2002), and by F. V. Fosella et al. (“Second line chemotherapy for NSCLC: establishing a gold standard,” Lung Cancer, 38, 5-12, 2002).

[0126] The epothilones (such as BMS-247550, epothilones B and D) are other drugs that bind to the taxane site; they are used to treat paclitaxel-resistant tumors. References may be had, e.g., to articles by D. M. Bolag et al. (“Epothilones: a new class of microtubule-stabilizing agents with a taxol-like mechanism of action,” Cancer Res., 55: 2325-2333, 1995), by M. Wartmann et al. (“The biology and medicinal chemistry of epothilones,” Curr. Med. Chem. Anti-Cancer Agents, 2: 123-148, 2002), by F. Y. Lee et al. (“BMS-247550: a novel epothilone analog with a mode of action similar to apcitaxel but possessing superior antitumour efficacy,” Clin. Cancer Res., 7: 1429-1437, 2001), and by K. Kamath et al. (“Suppression of microtubule dynamics by epothilone B in living MCF7 cells,” Cancer Res., 63: 6026-6031, 2003).

[0127] There are other microtubule binding sites disclosed in Table 1 of the 2004 Jordan et al. publication. Thus, e.g., it is disclosed that estramustine is used to treat prostrate cancer. Reference may be had, e.g., to articles by D. Panda et al. (“Stabilization of microtubule dynamics by estramustine by binding to a novel site in tubulin: a possible mechanistic basis for its antitumor action,” Proc. Nat. Acad. Sci USA94: 10560-10564, 1997), by O. Smaletz et al. (“Pilot study of epothilone B analog [BMS-247550] and estramustine phosphate in patients with progressive metastatic prostrate cancer following castration,” Ann. Oncol., 14: 1518-1524), by W. Kelly et al. (“Dose escalation study of intraveneous extramustine phosphate in combination with Paclitaxel and Carboplatin in patients with advanced prostate cancer,” Clin. Cancer Res. 9: 2098-2107, 2003), by G. Hudes et al. (“Phase 1 clinical and pharmacologic trial of intraveneous estramustine phosphate,” J. Clin. Oncol., 20: 1115-1127, 2002), and by B. Dahllof et al. (“Estramustine depolymerizes microtubules by binding to tubulin,” Cancer Res. 53, 4573-4581, 1993).

[0128] Referring again to the Jordan et al. article, and at page 256 thereof, the criticality of “highly dynamic microtubules” is discussed. It is disclosed that: “Mitosis in most cells progresses rapidly and the highly dynamic microtubules in the spindle are required for all stages of mitosis. First, for the timely and correct attachment of chromosomes at their kinetochoares to the spindle during prometaphase after nuclear-envelope breakdown . . . . Second, for the complex movements of the chromosomes that bring them to their properly aligned positons at the metaphase plate . . . . Last, for the synchronous separation of the chromosomes in anaphase and telophase after the metaphase . . . . During prometaphase, microtubules emanating from each of the two spindle poles make vast growing and shortening excursions, essentially probing the cytoplasm until they ‘find’ and become attached to chromosomes at their kinetocores . . . . Such microtubules must be able to grow for long distances . . . then shorten almost completely, then re-grow again, until they successfully become attached. The presence of a single chromosome that is unable to achieve a bipolar attachment to the spindle is sufficient to prevent a cell from transitioning to anaphase; the cell then remains blocked in a prometaphase/metaphase like state and eventually undergoes apoptosis (programmed cell death) . . . . We have found that suppression of microtubule dynamics by drugs such as paclitaxel (Taxol) and Vinca alkaloids seems to be a common mechanism by which these drugs block mitosis and kill tumour cells. Human osterosarcoma cells after incubation with . . . paclitaxel and . . . vinflunine are shown . . . . Many chromosomes are stuck at the spindle poles, unable to congress to the metaphase plate. At least one reason that cancer cells are relatively sensitive to these drugs compared to normal cells is that cancer cells divide more frequently than normal cells and therefore frequently pass though a stage of vulnerability to mitotic poisons.”

[0129] The anti-mitotic drugs may also interfere with “oscillations.” As is disclosed at page 257 of the Jordan et al. article, “During metaphase in the absence of drugs . . . the duplicated chromosomes, which are attached to the microtubules at their kinetohores, oscillate back and forth under high tension in the spindle equatorial region in concert with growth and shortening of the attached microtubles . . . . Superimposed on these oscillations, tubulin is continuously and rapidly added to microtubles at the kinetochores and is lost at the poles in a balanced fashion (that is, the microtubules treadmill) . . . . The oscillations are believed to be required for the proper functioning of the spindle. The absence of tension on the chromosomal kinetochores is also sufficient to block cell-cycle progress from metaphase to anaphase . . . . In apanphase . . . , microtubules that are attached to chromosomes must undergo a carefully regulated shortening at that same time that another proportion of spindle microtubles (the interpolar microtubules) lengthens.”

[0130] Anti-mitotic drugs interfere with these “microtubule dynamics” in different ways. As is disclosed at page 257 of the Jordan et al. article, “ . . . a large number of chemically diverse substances bind to soluble tubulin and/or directly to tubulin in the microtubules.” In one embodiment, the magnetic anti-mitotic drugs of this invention bind directly to soluble tubulin. In another embodiment, the magnetic anti-mitotic drugs of this invention bind to the polymerized tubulin in the microtubules.

[0131] As is also disclosed in the Jordan et al. article, “Most of these compounds are antimitotic agents and inhibit cell proliferation by acting on the polymerization dynamics of spindle microtubles, the rapid dynamics of which are essential to proper spindle function.” In one embodiment, the magnetic anti-mitotic compounds of this invention act on the polymerization dynamics of the spindle microtubules.

[0132] As is also disclosed in the Jordan et al. article, “The specific effects of individual microtubule-targeted drugs on the microtubule polymer mass and on the stability and dynamics of the microtubules are complex. Microtubule-targeted antimitotic drugs are usually classified into two main groups. One group, known as the microtubule-destabilizing agents, inhibits microtubule polymerization at high concentrations . . . .” In one embodiment, the magnetic anti-mitotic compounds of this invention inhibit microtubule polymerization at high concentrations.

[0133] As is also disclosed in the Jordan et al. article, “The second main group is known as the microtubule stabilizing agents. These agents stimulate microtubule polymerization and include paclitaxel . . . docetaxel . . . the epothilones, discodermolide . . . and certain steroids . . . .” In one embodiment, the magnetic anti-mitotic compounds of this invention stimulate microtubule polymerization.

[0134] As is also disclosed in the Jordan et al. article, “The classification of drugs as microtubule ‘stabilizers’ or ‘destabilizers’ is overly simplistic . . . . The reason . . . is that drugs that increase or decrease microtubule polymerization at high concentrations powerfully suppress microtubule dynamics at 10-100 fold lower concentrations and, therefore, kinetically stabilize the microtubules, without changing the microtubule-polymer mass. In other words, the effects of the drugs on dynamics are often more powerful than their effects on polymer mass. It was previously thought that the effects of the two classes of drugs on microtubule-polymer mass were the most important actions responsible for their chemotherapeutic properties. However, the drugs would have to be given and maintained at very high dosage levels to act primarily and continuously on microtubule-polymer mass. It now seems that the most important action of these drugs is the suppression of spindle-microtubule dynamics, which results in the slowing or blocking of mitosis at the metaphase-anaphase transition and induction of apoptioic cell death.” In one embodiment, the magnetic properties of applicants' anti-mitotic compounds result in the slowing or blocking of mitosis at the metaphase-anaphase transition.

[0135] As is also disclosed in the Jordan et al. article, “The microtubule-targeted drugs affect microtubule dynamics in several different ways. To suppress microtubule dynamics for a significant time, the drugs must bind to and act directly on the microtubule. For example, a drug that suppresses the shortening rate at microtubule ends must bind directly to the microtubule, either at its end or along its length . . . many drugs also act on soluble tubulin, and the relatively ability of a given drug to bind to soluble tubulin or directly to the microtubule, and the location of the specific binding site in tubulin and the microtubule, greatly affect the response of the microtubule system to the drug.”

[0136] At page 258 of the Jordan et al. article, the mechanism by which Vinca alkaloids kills cancer cells is discussed. It is stated that: “Tubulin and microtubules are the main targets of the Vinca alkaloids . . . , which depolymerize microtubles and destroy mitotic spindles at high concentrations . . . , therefore leaving the dividing cancer cells blocked in mitosis with condensed chromosomes. At low but clinically relevant concentrations, vinblastine does not depolymerize spindle microtubules, yet it powerfully blocks mitosis . . . and cells die by apoposis. Studies form our laboratory . . . indicate that the block is due to suppression of microtubule dynamics rather than microtubule depolymerization . . . . Vinblastine binds to the beta-submit of tublin dimmers at a distinct region called the Vinca-binding domain. Various other novel chemotherapeutic drugs also bind at this domain . . . . The binding of vinblastine to sulbue tubulin is rapid ad reversible . . . . Importantly, binding of vinblastine induces a conformational change in tubulin in connection with tubulin self-association . . . . The ability of vinblastine to increase the affinity of tubulin for itself probably has a key role in the ability of the drug to stabilize microtubules kinetically.”

[0137] The degree to which vinblastine binds to tubulin depends upon whether the tubulin is “exposed” or “buried.” As is also disclosed in the Jordan et al. article, “Vinblastine also binds directly to microtubules. In vitro, vinblastine binds to tubulin at the extreme microtubule ends . . . with very high affinity, but it binds with markedly reduced affinity to tubulin that is brued in the tubulin lattice . . . . Remarkably, the binding of one or two molecules of vinblastine per microtubule plus end is sufficient to reduce both treadmilling and dynamic instability by about 50 percent without causing appreciable microtubule depolymerization.”

[0138] By comparison, the taxanes bind poorly to soluble tubulin. As is also disclosed in the Jordan et al. article, “The taxanes bind poorly to soluble tubulin itself, but instead bind directly with high affinity to tubulin along the length of the microtubule . . . . The biding site for paclitaxel is in the beta-subunit, and its location, which is on the inside surface of the microtubule, is known with precision . . . . Paclitaxel is thought to gain access to its binding sites by diffusing through small openings in the microtubules or fluctuations in the microtubule lattice. Binding of paclitaxel to its site on the inside microtubule surface stabilizes the microtubule and increases microtubule polymerization, presumably by inducing a conformational change in the tubulin that, by an unknown mechanism, increases its affinity for neighboring tubulin molecules.” In one preferred embodiment of this invention, a preferred magnetic anti-mitotic compound of the invention binds well to soluble tubulin.

[0139] Even relatively small amounts of paclitaxel will stabilize the microtubules. As is disclosed in the Jordan et al. article, “There is one paclitaxel binding site on very molecule of tublin in a microtubule and the ability of paclitaxel to increase microtubule polymerization is associated with nearly 1:1 stoichiometric bind of paclitaxel to tubulin in microtubules So if a typical microtubule consists of approximately 10,000 tubulin molecules, then the ability of paclitaxel to increase microtubule polymerization requires the binding of about 5,000 paclitaxel molecules per microtubule. However, in contrast with the large number of molecules that are required to increase microtubule polymerization, we found that binding of a very small number of molecules stabilizes the dynamics of the microtubules without increasing microtubule polymerization.” Support for this statement in the article was a work by W. B. Derry et al., “Substoichiometric binding of taxol suppresses microtubule dynamics,” Biochemistry, 34: 2203-2211, 1995.

[0140] As is also disclosed in the Jordan et al. article, “ . . . just one paclitaxel molecule bound per several hundred tubulin molecules in a microtubule can reduce the rate of microtubule shortening by about 50 percent. Suppression of microtubule dynamics by paclitaxel leads to mitotic block in the absence of significant microtubule bundling.” Basis for this statement was an article by A. M. Yvon et al., “Taxol suppresses dynamics of individual microtubules in living human tumor cells,” Mol. Biol. Cell, 10:947-949, 1999. This Yvon et al. article was the “first demonstration that suppression of microtubule dynamics in living cells by low concentrations of paclitaxel correlates with mitotic block.”

[0141] As is also disclosed in the Jordan et al. article, “ . . . the suppression of spindle-microtubule dynamics prevents the dividing cancer cells from progressing from metaphase into anaphase and the cells eventually die by apoptosis.” As basis for this statement, articles were cited by M. A. Jordan et al. (“Mitotic block induced in HeLa cells by low concentrations of paclitaxel [Taxol] results in abnormal mitotic exit and apoptotic cell death,” Cancer Res., 56: 816-825, 1996), by Yvon et al. (“Taxol suppresses dynamics of individual microtubules in living human tumor cells, Mol. Biol. Cell, 10: 947-949, 1999), and by J. Kelling et al. (“Suppression of centromere dynamics by taxol in living osteosarcoma cells,” Cancer Res., 63: 2794-2801, 2003).

[0142] The Jordan et al. article also discusses the mechanism by which colchicines exerts its anti-mitotic effects. At pages 260 et seq., it discloses that: “The interaction of colchicines with tubulin and microtubules presents yet another variation in the mechanisms by which microtubule-active drugs inhibit microtubule function. As with the Vinca alkaloids, colchicines depolymerizes microtubles at high concentrations and stabilizes microtubule dynamics at low concentrations. Colchicine inhibits microtubule polymerization substoichiometrically (at concentrations well below the concentration of tubulin that is free in solution . . . .” In support of this statement, the Jordan et al. article cites an article by L. Wilson et al. (in Microtubules [eds. J. S. Hymans et al.], 59-84 [Wiley-Liss, New York, N.Y., 1994]).

[0143] As is also disclosed in the Jordan et al. article, “ . . . colchicine itself does not bind directly to microtubule ends. Instead, it first binds to soluble tubulin, induces slow conformational changes in the tubulin and ultimately forms a poorly reversible final state tubulin-colchicine complex . . . which then copolymerizes into the microtubule ends in small numbers along with large numbers of free tubulin molecules.”

[0144] The Jordan et al. article discloses that the tubulin-colchicine complexes must bind more tightly to tublin that tubulin itself does, stating that: “Tubulin colchicines complexes might have a conformation that disrupts the microtubule lattice in a way that slows, but does not prevent, new tubulin addition. Importantly, the incorporated tubulin-colchicine complex must bind more tightly to its tubulin neighbors than tubulin itself does, so that the normal rate of tubulin dissociation is reduced.”

[0145] As is also disclosed in the Jordan et al. article, “So, despite the differences between the effects at high concentrations of the Vinca/colchicines-like drugs and the taxane-like drugs, nearly all of the microtubule-targeted antimitotic drugs stabilize microtubule dynamics at their lowest effective concentrations. Stabilization of microtubule dynamics correlates with blocking of the cell cycle at mitosis and in sensitive tumour cells, ultimately resulting in cell death by apoptosis. Therefore, the most potent mechanism of nearly all of the microtubule-targeted drugs seems to be the stabilization of dynamics of mitotic spindle microtubles.”

[0146] In one preferred embodiment of this invention, the antimitotic compounds of this invention inhibit the process of angiogenesis (the formation of new blood vessels). In another embodiment of this invention, the antimitotic compounds of this invention shut down the existing vasculature of tumors.

[0147] Prior art compositions that have these antivascular effects have been reported. Thus, as is disclosed at page 260 of the 2004 Jordan et al. article, “The tumour vasculature is a relatively attractive new target for cancer therapy. The vasculature is easily accessible to blood-borne therapeutic agents, and tumour cells generally die rapidly unless they are supplied with oxygen and nutrients through the blood. There are two types of approaches to inhibiting vascular function. One . . . is the search for agents that inhibit the process of angiogenesis—the formation new blood vessels. However, more recently, the ability of several compounds, especially microtubule-targeted agents, to rapidly shout down existing tumour vasculature has been recognized . . . .” In support of this last statement, the Jordan et al. article cited an article by G. M. Tozer et al. on “The biology of the combretastatins as tumour vascular targeting agents,” Int. J. Exp. Pathol., 83: 21-38 (2002).

[0148] As is also disclosed in the 2004 Jordan et al. article, “Since the late 1990s, the combestatins and N-acetylcolchicinol-O-phosphate, compounds that resemble colchicines and bind to the colchicines domain on tubulin, have undergone extensive development as antivascular agents . . . . When vascular targeting agents . . . are added to cultures of endothelial cells . . . , the microtubules rapidly depolymerize, the cells become round within minutes, undergo blebbing and detaching from the substrate, actin stress fibres form (presumably as a result of signaling from the depolymerizing microtubule cytoskeleton), and the cells die with no evidence of apoptosis.” As support for this latter statement, the 2004 Jordan et al. article cited a work by C. Kanthou et al., “The tumor vascular targeting agent combretastatin A-4 phosphate induces reorganization of the actin cytoskeleton and early membrane blebbing in human endothelial cells,” Blood, 99:2060-2069 (2002).

[0149] As is also disclosed in the 2004 Jordan et al. article, “The process of vascular shutdown can be observed in rats through windowed chambers that are implanted subcutaneously. This indicates that a primary and marked effect of vascular-targeting agents is an extremely rapid reduction of blood flow to the interior of solid tumours, often within 5 minutes of administering the drug to the animal. Within 1 hour, the red-cell velocity might drop to less than 5 percent of the starting value.” As support for this statement, the 2004 Jordan et al. article cited a work by G. M. Tozer et al. on “Mechanisms associated with tumor vascular shut-down induced by combretastatin A-4 phosphate: intravital microscopy and measurement of vascular permeability,” Cancer Res., 61: 6413-6422 (2001).

[0150] The anti-vascular agents cause small blood vessels to disappear, blood flow to slow, red blood cells to aggregate in stacks or “rouleaux,” hemorrhaging from peripheral tumor vessels to occur, vascular permeability to increase, and the death of interior tumor cells by necrosis. See, e.g., an article by G. M. Tozer et al., “The Biology of the combretastatins as tumor vascular targeting agents,” Int. J. Exp. Pathol, 83: 21-38 (2002).

[0151] As is also disclosed in the 2004 Jordan et al. article, “ . . . the vascular-targeting agents that are now under development seem to damage tumour vasculature without significantly harming normal tissues . . . .” The Jordan et al. article, as support for this statement, cites work by V. E. Prise et al., reported in “The vascular response of tumor and normal tissues in the rat to the vascular targeting agent combretastatin A4 phosphate, at clinically relevant doses,” Int. J. Oncol. 21: 717-726 (2002). In one embodiment, the magnetic anti-mitotic compound of this invention damages tumors without significantly harming normal tissues.

[0152] As is also disclosed in the 2004 Jordan et al. article, “The source of this specificity is not known, but has been suggested to be attributable to differences between the mature vasculature of normal tissues and the immature or forming vasculature of tumors. There are suggestions that endothelial cells of immature vasculature could have a less well-developed actin cytoskeleton that might make the cells more susceptible to collapse.” The basis for this statement was an article by P. D. Davis et al., “ZD6126: A novel vascular-targeting agent that causes selective destruction of tumor vasculature,” Cancer Res. 62: 7247-7253 (2003).

[0153] As is also disclosed in the 2004 Jordan et al. article, “ . . . more sluggish or more variable blood flow in tumour vasculature might make the tumour vessels particularly susceptible to damaging agents. Differences in rates of endothelial-cell proliferation, in post-translational modifications of tubulin, and in interactions between actin and microtubules might also contribute to the specificity of vascular targeting agents.”

[0154] At page 261 of the 2004 Jordan et al. article, tumor sensitivity and resistance are discussed. It is disclosed that: “Among the most important unsolved questions about the antitumour activities of microtubule-targeted drugs concerns the basis of their tissue specificities and the basis for the development of drug resistance to these agents. For example, it is not known why paclitaxel is so effective against ovarian, mammary and lung tumours, but essentially ineffective against many other solid tumours, such as kidney or color carcinomas and various sarcomas. Similarly, for the Vinca alkaloids, it is unclear why they are frequently most effective against haematological cancers, but often ineffective against many solid tumors. There are clearly many determinants of sensitivity and resistance to antimitotic drugs, both at the level of the cells themselves and at the level of the pharmacological accessibility of the drugs to the tumour cells.” As authority for these statements, the 2004 Jordan et al. article cited work by C. Dumontet et al., “Mechanisms of action of and resistance to antitubulin agents: microtubule dynamics, drug transport, and cell death,” J. Clin. Oncol., 17:1061-1070 (1999).

[0155] As is also disclosed in the 2004 Jordan et al. article, “the “ultimate failure or inherent resistance to chemotherapy with antimitotic drugs often results from overexpression of a class of membrane transporter proteins known as ABC-transporters (ATP-dependent drug efflux pumps or ATP-binding cassettes). These membrane pumps produce decreased intracellular drug levels and lead to cross-resistance (multidrug resistance) . . . to drugs of different chemical structures, such as paclitaxel and Vinca alkaloids. The first of many identified was P-glycoprotein, the product of the human MDRI gene.” As support for these statements, the 2004 Jordan et al. article cited work by S. V. Ambudkar et al., “P-glycoprotein: from genomics to mechanism,” Oncogene, 22: 7468-7485 (2003).

[0156] In one preferred embodiment, the magnetic anti-mitotic compound of this invention is not removed by these membrane pumps. It should be noted that, as is reported by the 2004 Jordan et al. article, “Considerable efforts are underway to understand these mechanisms of resistance, to develop P-glycoprotein inhibitors and to develop microtubule-targeted drugs that are not removed by these pumps. As authority for these statements, the 2004 Jordan et al. article cited works by S. V. Ambdukar et al. (see the citation in the preceding paragraph), by A. R. Safa (“Identification and characterization of the binding sites of P-glycoprotein for multidrug-resistance-related drugs and modulators,” Curr. Med. chem. Anti-Canc. Agents, 4: 1-17, 2004), by H. Thomas et al. (“Overcoming multidrug resistance in cancer: an update on the clinical strategy of inhibiting P-glycoprotein,” Cancer Control, 10: 159-165, 2003), and by R. Geney et al. (“Overcoming multidrug resistance in taxane chemotherapy,” Clin. Chem. Lab. Med., 40: 918-925, 2002).

[0157] The 2004 Jordan et al. article discusses the role of specific tubulin isotypes in multidrug resistance. At page 262 of the article, it is stated that: “However, in addition, cells also have many microtubule-related mechanisms that confer resistance or determine intrinsic insensitivity to antimitotic drugs.” As support for these statements, the Jordan et al. article cites an article by G. A. Orr et al. (“Mechanisms of taxol resistance related to microtubules,” Oncogene, 22: 7280-7295, 2003) which is a comprehensive review of microtubule-related mechanisms of paclitaxel resistance. The article also cites works by M. Kavallaris et al. (“Multiple microtubule alterations are associated with Vinca alkaloid resistance in human leukemia cells,” Cancer Res, 61: 5803-5809, 2001), by A. M. Minotti et al. (“Resistance to antimitotic drugs in Chinese hamster overlay cells correlated with changes in the level of polymerized tubulin,” J. Biol. Chem., 266: 3987-3994, 1991), by S. W. James et al. (A mutation in the . . . tubulin gene of Chlamydomonas reinhardtii confers resistance to anti-microtubule herbicides,” J. Cell Sci. 106: 209-218, 1993), by W. P. Lee et al. (“Purification and characterization of tublin form parental and vincristine-resistant HOB1 lymphoma cells,” Arch. Biochem. Biophys. 319: 498-503, 1995), by S. Ohta et al. (“Characterization of a taxol-resistant human small-cell lung cancer cell line,” Jpn. J. Cancer Res., 85: 290-297, 1994), and by N. M. Laing et al. (“Amplification of the ATP-binding cassette 2 transporter gene if functionally linked with enhanced efflux of estramustine in ovarian carcinoma cells,” Cancer Res., 58: 1332-1337, 1998.)

[0158] In one preferred embodiment of this invention, the magnetic anti-mitotic compound of this invention binds to, and inactivates, a tubulin isotype that causes, or tends to cause, drug-resistance.

[0159] As is also disclosed in the 2004 Jordan et al. article, “Microtubule polymer levels and dynamics are regulated by a host of factors, including expression of regulatory proteins, post-translational modifications of tubulin and expression of different tubulin isotypes. The levels of each of these isotypes differ among tissue and cell types, and there are numerous examples of changes in their levels that correlate with development of resistance of paclitaxel or Vinca alkaloids and other microtubule-targeted drugs.” In support of these statements, the Jordan et al. article cited works by C. M. Galmarini et al. (“Drug resistance associated with loss of p53 involves extensive alterations in microtubule composition and dynamics,” Br. J. Cancer, 88:1793-1799, 2003), by C. A. Burkart et al. (“The role of beta-tubulin isotypes in resistance to antimitotic drugs,” Biochim. Biophys. Acta, 2: 01-09, 2001), by C. Dumontet et al. (“Resistance to microtubule-targeted cytotoxins in a K562 leukemia cell variant is associated with altered tubulin expression,” Elec. J. Oncol., 2: 33-44, 1999), by P. Giannakakou et al. (“A common pharmacophore for epothilone and taxanes: molecular basis for drug resistance conferred by tubulin mutations in human cancer cells, Proc. Natl. Acad. Sci USA, 97: 2904-2090, 2000), by A. Goncalves et al. (“Resistance to taxol in lung cancer cells associated with increased microtubule dynamics,” Proc. Natl. Acad. Sci USA, 98:11737-11741, 2001), by M. Haber et al. (“Altered expression of M32, the class II beta-tubulin isotype, in a murine J774.2 cell line with a high level of taxol resistance,” J. Biol. Chem., 270: 31269-31275, 1995), by J. P. Jaffrezou et al. (“Novel mechanism of resistance to paclitaxel in human K562 leukemia cells by combined selection with PSC833,” Oncology Res., 7: 512-517, 1995), and by M. Kavallaris et al. (“Taxol-resistant epithelial ovarian tumors are associated with altered expression of specific beta-tubulin isotypes), J. Clin. Invest. 100: 1-12, 1997. In one embodiment, the “ . . . specific beta-tubulin isotypes” that are preferentially expressed by malignant cells are preferentially bound to (and inactivated) by the magnetic, anti-mitotic compound of this invention, as is more fully discussed elsewhere in this specification.

[0160] As is also disclosed in the 2004 Jordan et al. article, “ . . . subtle suppression of microtubule dynamics by paclitaxel, vinblastine or other antimitotic drugs, without any attendant change in the microtubule-polymer mass, prevents progress through the cell cycle from metaphase to anaphase in sensitive cells. Changes in microtubule dynamics can lead to altered sensitivity to microtubule-targeted drugs. In one well studied case of paclitaxel resistance, resistant and paclitaxel-dependent A549 lung cancer cells had inherently faster microtubule dynamics following withdrawal of paclitaxel than sensitive cells . . . .” As support for this statement, the article cited work by A. Goncalves et al., reported in “Resistance to taxol in lung cancer cells associated with increased microtubule dynamics,” Proc. Natl. Acad. Sci. USA, 98: 11737-11747, 2001.”

[0161] As is also disclosed in the 2004 Jordan et al. article, “In the absence of paclitaxel, the paclitaxel-resistant/dependent cells with the faster microtubule dynamics were unable to progress from metaphase to anaphase and their spindles became disorganized. So, these cells were resistant to paclitaxel and also dependent on paclitaxel to slow their dynamics and allow them to go through mitosis successfully. The inherent sensitivity of cells to subtle changes in microtubule dynamics means that there are numerous ways for cells to become resistant to microtubule-targeted drugs. In the case of the paclitaxel-resistant A549 cells discussed above, the mechanisms of increased dynamics seem to involve several changes. The resistant cells overexpress one of the isotypes of tubulin, BIII-tubulin.”

[0162] As support for this last statement, the 2004 Jordan et al. article cited works by M. Kavallaris et al. (“Antisense oligonucleotides to class III beta-tubulin sensitive drug-resistant cells to taxol,” Br. J. Cancer, 80: 1020-1025, 1991), by L. A. Martello et al. (“Taxol and discodermolide represent a synergistic drug combination in human carcinoma cell lines,” Clin. Cancer Res., 6: 1978-1987, 2000), and another article by Martello et al. (“Elevated levels of microtubule-destabilizing factors in a taxol-resistant A549 cell line with a alpha-tubulin mutation,” Cancer Res., 63: 1207-1213, 2003. In one embodiment of this invention, the anti-mitotic compound of this invention is used to bind with, and inactivate, the beta-tubulin isotype(s) expressed by the drug-resistant cancer cells.

[0163] As is also disclosed in the 2004 Jordan et al. article. “In addition, they have a heterozygous point mutation in alpha-tubulin and they overexpress the active form of the microtubule-destabilizing protein stahmin and the inactive form of the putative microtubule stabilizing protein MAP 4.”

[0164] As is also disclosed in the 2004 Jordan et al. article, “ . . . drug resistance might involve some of the other forms of tubulin . . . that associate with the centrosomes in intraphase and with the spindle poles in mitotic cells.” In one embodiment of this invention, the anti-mitotic compound of this invention binds to, and inactivates, one or more of these other forms of tubulin.

[0165] As is also disclosed in the 2004 Jordan et al. article. “The fact that antimitotic drugs bind to many diverse sites on tubulin and microtubles mean that clinical combinations of two or more of these drugs have the potential to improve efficiency and reduce the side effects of therapy.” In one embodiment of this invention, the actions of two or more separate chemotherapeutic agents are combined into one compound or composition. In another embodiment, the anti-mitotic compound of this invention is administered with another chemotherapeutic agent, prior to the administration of another chemotherapeutic agent, or after the administration of another chemotherapeutic agent. This embodiment is discussed elsewhere in this specification.

[0166] As is also disclosed in the 2004 Jordan et al. article, “The discovery of the synergistm of paclitaxel with discodermolide is particularly interesting, as both drugs bind to the same or overlapping sites on tubulin or microtubules.” In one embodiment, the magnetic, anti-mitotic compound of this invention binds to the same or overlapping sites on tubulin or microtubules as does paclitaxel.

[0167] Many of the matters disclosed in the 2004 Jordan et al. article regarding tubulin isotype are also disclosed in the patent literature.

[0168] By way of illustration, U.S. Pat. No. 5,888,818, the entire disclosure of which is hereby incorporated by reference into this specification, claims “An isolated DNA encoding an alpha.- or .gamma.-tubulin, which tubulin is resistant to an anti-tubulin agent selected from the group consisting of dinitroanaline, phosphorothioamidate and chlorthal dimethyl, the resistant tubulin comprising a non-polar amino acid instead of a threonine residue at a position corresponding to that depicted as position 239, 237, or 240 in Table 2.” At columns 1 et seq. of such patent, an excellent discussion of microtubules and tubulin isotypes is presented.

[0169] Thus, as is disclosed in U.S. Pat. No. 5,888,818, “Almost all eukaryotic cells contain microtubules which comprise a major component of the network of proteinaceous filaments known as the cytoskeleton. Microtubules thereby participate in the control of cell shape and intracellular transport. They are also the principal constituent of mitotic and meiotic spindles, cilia and flagella. In plants, microtubules have additional specialized roles in cell division and cell expansion during development.”

[0170] As is also disclosed in U.S. Pat. No. 5,888,818, “In terms of their composition, microtubules are proteinaceous hollow rods with a diameter of approximately 24 nm and highly variable length. They are assembled from heterodimer subunits of an .alpha.-tubulin and a β-tubulin polypeptide, each with a molecular weight of approximately 50,000. Both polypeptides are highly flexible globular proteins (approximately 445 amino acids), each with a predicted 25% .alpha. helical and 40% β-pleated sheet content. In addition to the two major forms (.alpha.-and β-tubulin), there is a rare .gamma.-tubulin form which does not appear to participate directly in the formation of microtubule structure, but rather it may function in the initiation of microtubule structure.”

[0171] As is also disclosed in U.S. Pat. No. 5,888,818, “In all organisms, the multiple alpha.- and β-tubulin polypeptides are encoded by corresponding families of alpha.- and β-tubulin genes, which are located in the nuclear genome. Many such genes (or corresponding cDNAs) have been isolated and sequenced. For example, maize has approximately 6.alpha.-tubulin genes and approximately 8 β-tubulin genes dispersed over the genome (Villemur et al, 1992, 34th Maize Genetics Symposium). Some of the .alpha.-tubulin genes from maize have been cloned and sequenced (Montoliu et al, 1989, Plant Mol Biol, 14, 1-15; Montoliu et al, 1990, Gene, 94, 201-207; Villemur et al, 1992, J Mol Biol, 227:81-96), as have some of the β-tubulin genes (Hussey et al, 1990, Plant Mol Biol, 15, 957-972). Comparison of amino acid sequences of the three documented maize .alpha.-tubulins indicates they have 93% homology. Maize β-tubulins exhibit 38% identity with these alpha.-tubulins. In segments of divergence between the alpha.- and β-tubulin amino acid sequences, homology ranges from 13% to 17%. Homology between the three .alpha.-tubulin amino acid sequences within these same .alpha.-/β-divergence regions ranges from 77% to 96%.”

[0172] As is also disclosed in U.S. Pat. No. 5,888,818, “Sequence information on the various tubulin forms shows that throughout evolution the protein domains involved in polymerization have been highly conserved, and interspecies amino acid sequence homology is generally high. For example, the four β-tubulin isotypes in human are identical with their counterparts in mouse. There is 82-90% homology between mammalian neuronal or constitutively expressed tubulins and algal, protozoan and slime mould tubulins. Considering plant sequences in more detail, there are long stretches in which the amino acid sequence of all the alpha.- and β-tubulins are identical (Silflow et al, 1987, Developmental Genetics, 8, 435-460). For example, the 35 amino acids in positions 401-435 are identical in all plant alpha.-tubulins, as are the 41 amino acids in the region between positions 240 and 281 in the plant β-tubulins. Conservation of amino acid residues is approximately 40% between the alpha.- and β-tubulin families, and 85-90% within each of the alpha.- and β-tubulin families. It should be noted that in general, most .alpha.-tubulins are 1 to 5 residues larger that the β-tubulins.”

[0173] U.S. Pat. No. 5,888,818 then goes on to discuss anti-tubulin agents, stating that: “The economic interest of tubulins lies in the effect of certain agents which interfere with tubulin structure and/or function. Such agents (including non-chemical stresses) are hereinafter referred to as ‘anti-tubulin agents’ as they share a similar type of mode of action. Extreme conditions are known to destabilize the tubulins and/or microtubules. Such conditions include cold, pressure and certain chemicals. For example, Correia (1991, Pharmac Ther, 52:127-147) describes .alpha.- and β-tubulin interactions, microtubule assembly and drugs affecting their stability. Some anti-tubulin agents are often called ‘spindle poisons’ or ‘antimitotic agents’ because they cause disassembly of microtubules which constitute the mitotic spindle. For at least one hundred years, it has been known that certain chemical agents arrest mammalian cells in mitosis, and of these agents the best known is colchicine which was shown in the mid-1960s to inhibit mitosis by binding to tubulin. Many of these anti-tubulin agents have since found widespread use as cancer therapeutic agents (eg vincristine, vinblastine, podophyllotoxin), estrogenic drugs, anti-fungal agents (eg griseofulvin), antihelminthics (eg the benzimidazoles) and herbicides (eg the dinitroanilines). Indeed some of the specific agents have uses against more than one class of organism. For example, the dinitroaniline herbicide trifluralin has recently been shown to inhibit the proliferation and differentiation of the parasitic protozoan Leishmania (Chan and Fong, 1990, Science, 249:924-926).” Thus, as is apparent from this teaching, the magnetic, anti-mitotic drugs disclosed in this specification may be used not only to treat cancer but also as “ . . . estrogenic drugs, anti-fungal agents . . . , antihelminthics . . . and herbicides . . . .”

[0174] As is also disclosed in U.S. Pat. No. 5,888,818, “The dinitroaniline herbicides may be considered as an example of one group of anti-tubulin agents. Dinitroaniline herbicides are widely used to control weeds in arable crops, primarily for grass control in dicotyledonous crops such as cotton and soya. Such herbicides include trifluralin, oryzalin, pendimethalin, ethalfluralin and others. The herbicidally active members of the dinitroaniline family exhibit a common mode of action on susceptible plants. For example, dinitroaniline herbicides disrupt the mitotic spindle in the meristems of susceptible plants, and thereby prevent shoot and root elongation (Vaughn K C and Lehnen L P, 1991, Weed Sci, 39:450-457). The molecular target for dinitroaniline herbicides is believed to be tubulin proteins which are the principle constituents of microtubules (Strachan and Hess, 1983, Pestic Biochem Physiology, 20, 141-150; Morejohn et al, 1987, Planta, 172, 252-264).”

[0175] As is also disclosed in U.S. Pat. No. 5,888,818, “The extensive interest in anti-tubulin agents in many branches of science has been accompanied by the identification of several mutants shown to resist the action of such agents (Oakley B R, 1985, Can J Biochem Cell Biol, 63:479-488). Several of these mutants have been shown to contain modified alpha.- or β-tubulin genes, but to date the only resistant mutants to be fully characterised and sequenced are those in β-tubulin. For example, colchicine resistance in mammalian cell lines is closely associated with modified β-tubulin polypeptides (Cabral et al, 1980, Cell, 20, 29-36); resistance to benzimidazole fungicides has been attributed to a modified β-tubulin gene, for example in yeast (Thomas et al, 1985, Genetics, 112, 715-734) and Aspergillus (Jung et al, 1992, Cell Motility and the Cytoskeleton, 22:170-174); some benzimidazole resistant forms of nematode are known; and dinitroaniline-resistant Chlamydomonas mutants possess a modified β-tubulin gene (Lee and Huang, 1990, Plant Cell, 2, 1051-1057). Some of these mutants, although resistant to one anti-tubulin agent, also show increased susceptibility to other anti-tubulin agents (such as cold stress).” As is also discussed elsewhere in this, and in one preferred embodiment, the anti-mitotic compounds and/or compositions of this invention are adapted to bind one or more of the tubulin isotypes expressed by such mutants.

[0176] As is also disclosed in U.S. Pat. No. 5,888,818, “Among certain weed species, some biotypes have evolved resistance to dinitroaniline herbicides. Three examples of species in which dinitroaniline resistant (R) biotypes have emerged are goosegrass, Eleusine indica (Mudge et al, 1984, Weed Sci, 32, 591-594); green foxtail, Setaria viridis (Morrison et al, 1989, Weed Technol, 3, 554-551); and Amaranthus palmeri (Gossett et al, 1992, Weed Technology, 6:587-591). These resistant (R) biotypes emerged following selective pressure exerted by repeated application of trifluralin. A range of resistant biotypes of each species exists but the nature and source of the resistance trait is unclear and the biotypes are genetically undefined. The R biotypes of these species exhibit cross-resistance to a wide range of dinitroaniline herbicides, including oryzalin, pendimethalin and ethalfluralin. All dinitroaniline herbicides have a similar mode of action and are therefore believed to share a common target site. Many of the R biotypes are also cross-resistant to other herbicide groups such as the phosphorothioamidates, which include amiprophos-methyl and butamifos, or chlorthal-dimethyl. The phenomenon of cross-resistance exhibited by resistant biotypes strongly indicates that the herbicide resistance trait is a consequence of a modified target site. In addition, the resistant biotypes appear to have no competitive disadvantage as they grow vigorously and can withstand various stresses (such as cold).” To the extent that the drug resistant trait is “ . . . a consequence of a modified target site . . . ,” and in one preferred embodiment, the magnetic anti-mitotic compounds of this invention are adapted to preferentially bind to such modified target site.

[0177] As is also disclosed in U.S. Pat. No. 5,888,818, “It has not been previously shown which specific gene is modified in Eleusine indica or Setaria viridis to confer the dinitroaniline resistance trait. Research by K. C. Vaughn and M. A. Vaughn (American Chemical Society Symposium Series, 1989, 364-375) showed an apparent alteration in the electrophoretic properties of β-tubulin present in an R biotype of Eleusine indica, and suggested dinitroaniline resistance results from the presence of a modified β-tubulin polypeptide. The results of recent work by Waldin, Ellis and Hussey (1992, Planta, 188:258-264) provide no evidence that dinitroaniline herbicide resistance is associated with an electrophoretically modified β-tubulin polypeptide in the resistant biotypes of Eleusine indicator Setaria viridis which were studied.” In one preferred embodiment of this invention, the magnetic anti-mitotic agent of this invention is adapted to bind to a target site on a beta-tubulin polypeptide.

[0178] U.S. Pat. No. 6,306,615, the entire disclosure of which is hereby incorporated by reference into this specification, claims a detection method for identifying modified beta-tubulin isotypes. Thus, e.g., claim 17 of this patent discloses: “17. A method of monitoring the amount of a tubulin modified at a cysteine residue at amino acid position 239 in a patient treated with a sulfhydryl or a disulfide tubulin modifying agent, the method comprising the steps of: (a) providing a sample from the patient treated with the tubulin modifying agent; (b) contacting the sample with an antibody that specifically binds to the tubulin modified at a cysteine residue at amino acid position 239; and (c) determining the amount of the tubulin modified at a cysteine residue at amino acid position 239 in the patient sample by detecting the antibody and comparing the amount of antibody detected in the patient sample to a standard curve, thereby monitoring the amount of the tubulin modified at a cysteine residue at amino acid position 239 in the patient.”

[0179] As is also disclosed in U.S. Pat. No. 6,306,615, “Microtubules are composed of .alpha./β-tubulin heterodimers and constitute a crucial component of the cell cytoskeleton. Furthermore, microtubules play a pivotal role during cell division, in particular when the replicated chromosomes are separated during mitosis. Interference with the ability to form microtubules from .alpha./β-tubulin heterodimeric subunits generally leads to cell cycle arrest. This event can, in certain cases, induce programmed cell death. Thus, natural products and organic compounds that interfere with microtubule formation have been used successfully as chemotherapeutic agents in the treatment of various human cancers.”

[0180] As is also disclosed in U.S. Pat. No. 6,306,615, “Pentafluorophenylsulfonamidobenzenes and related sulfhydryl and disulfide modifying agents (see, e.g., compound 1; 2-fluoro-1-methoxy-4-pentafluorophenylsulfonamidobenzene; . . . prevent microtubule formation by selectively covalently modifying β-tubulin. For example, compound 1 does not covalently modify all of the five known β-tubulin isotypes. Instead, binding is restricted to those β-tubulin isotypes that have a cysteine residue at amino acid position 239 in β-tubulin. Such isotypes include beta-1, beta-2, and beta-4. The other two isotypes (beta-3 and beta-5) have a serine residue at this particular position (Shan et al., Proc. Nat'l Acad. Sci USA 96:5686-5691 (1999)). It is notable that no other cellular proteins are modified by compound 1.” In one embodiment of this invention, the anti-mitotic compound of this invention selectively covalently modifies certain beta-tubulin isotypes but does not covalently modify other proteins.

[0181] U.S. Pat. No. 6,362,321, the entire disclosure of which is hereby incorporated by reference into this specification, discusses taxol-resistant cancer cell lines. At column 1 of this patent, it is disclosed that: “Many of the most common carcinomas, including breast and ovarian cancer, are initially relatively sensitive to a wide variety chemotherapy agents. However, acquired drug resistance phenotype typically occurs after months or years of exposure to chemotherapy. Determining the molecular basis of drug resistance may offer opportunities for improved diagnostic and therapeutic strategies.”

[0182] As is also disclosed in U.S. Pat. No. 6,362,32, “Taxol is a natural product derived from the bark of Taxus brevafolio (Pacific yew). Taxol inhibits microtubule depolymerization during mitosis and results in subsequent cell death. Taxol displays a broad spectrum of tumorcidal activity including against breast, ovary and lung cancer (McGuire et al., 1996, N. Engld. J. Med. 334:1-6; and Johnson et al., 1996, J. Clin. Ocol. 14:2054-2060). While taxol is often effective in treatment of these malignancies, it is usually not curative because of eventual development of taxol resistance. Cellular resistance to taxol may include mechanisms such as enhanced expression of P-glycoprotein and alterations in tubulin structure through gene mutations in the B chain or changes in the ratio of tubulin isomers within the polymerized microtubule (Wahl et al., 1996, Nature Medicine 2:72-79; Horwitz et al., 1993, Natl. Cancer Inst. 15:55-61; Haber et al., 1995, J. Biol. Chem. 270:31269-31275; and Giannakakou et al., 1997, J. Biol. Chem. 272:17118-17125). Some tumors acquires taxol resistance through unknown mechanisms.”

[0183] International publication WO02/36603A2, the entire disclosure of which is hereby incorporated by reference into this specification, discloses nucleic acid molecules comprising a nucleotide sequence encoding a tubulin molecule. At pages 1 et seq. of this patent document, it is disclosed that: “Microtubules are essential to the eucaryotic cell due as they are involved in many processes and functions such as, e.g., being components of the cytoskeleton, of the centrioles and ciliums and in the formation of spindle fibres during mitosis. The constituents of microtubules are heterodimers consisting of one alpha-tubulin molecule and one beta-tubulin molecule. These two related self-associating 50 kDa proteins are encoded by a multigen family. The various members of this multigen family are dispersed all over the human genome. Both alpha-tubulin and beta-tubulin are most likely to originate from a common ancestor as their amino acid sequence shows a homology of up to 50%. In man there are at least 15 genes or pseudogenes for tubulin.

[0184] As is also disclosed in International Publication WO0236603, “The conservation of structure and regulatory functions among the beta-tubulin genes in three vertebrate species (chicken, mouse and human) allowed the identification of and categorization into six major classes of beta-tubulin polypeptide isotypes on the basis of their variable carboxyterminal ends. The specific, highly variable 15 carboxyterminal amino acids are very conserved among the various species. Beta-tubulins of categories I, 11, and IV are closely related differing only 2-4% in contrast to categories III, V and VI which differ in 8-16% of amino acid positions [Sullivan K. F., 1988, Ann. Rev. Cell Biol. 4: 687-716].

[0185] As is also disclosed in International Publication WO0236603, “Also the expression pattern is very similar between the various species as can be taken from the following table [Sullivan K. F., 1988, Arm. Rev. Cell Biol. 4: 687-716] which comprises the respective human members of each class . . . . The C terminal end of the beta-tubulins starting from amino acid 430 is regarded as highly variable between the various classes. Additionally, the members of the same class seem to be very conserved between the various species.”

[0186] As is also disclosed in International Publication WO0236603, “As tubulin molecules are involved in many processes and form part of many structures in the eucaryotic cell, they are possible targets for pharmaceutically active compounds. As tubulin is more particularly the main structural component of the microtubules it may act as point of attack for anticancer drugs such as vinblastin, colchicin, estramustin and taxol which interfere with microtubule function. The mode of action is such that cytostatic agents such as the ones mentioned above, bind to the carboxyterminal end the beta-tubulin which upon such binding undergoes a conformational change. For example, Kavallaris et al. [Kavallaris et al. 1997, J. Clin. Invest. 100: 1282-1293] reported a change in the expression of specific beta-tubulin isotypes (class I, II, III, and IVa) in taxol resistant epithelial ovarian tumor. It was concluded that these tubulins are involved in the formation of the taxol resistence. Also a high expression of class III beta-tubulins was found in some forms of lung cancer suggesting that this isotype may be used as a diagnostic marker.”

[0187] As is also disclosed in International Publication WO0236603, “The problem underlying the present invention was to provide the means to further characterize the various tubulins present in eucaryotic cells. A further problem underlying the present invention was to provide the means to extend possible screening programs for cytostatic agents to other isotypes of human beta-tubulins. This problem is solved in a first aspect by a nucleic acid molecule comprising a nucleotide sequence encoding a tubulin molecule, wherein said nucleic acid molecule comprises the sequence according to SEQ. ID. No. 1 This problem is solved in a second aspect by a nucleic acid molecule comprising a nucleotide sequence encoding a tubulin molecule, wherein said nucleic acid molecule comprises the sequence according to SEQ. ID. No. 2.” The aforementioned SEQ. ID. No. 1 and SEQ. ID. No. 2 are referred to herein as SEQ. ID No. 291 and 292 respectively.

[0188] Published United States patent application 2002/0106705, the entire disclosure of which is hereby incorporated by reference into this specification, describes a method for detecting a modified beta-tubulin isotype. Claim 1 of this patent, which is typical, describes: “A method of detecting in a sample a β-tubulin isotype modified at cysteine residue 239, the method comprising the steps of: (a) providing a sample treated with a β-tubulin modifying agent; (b) contacting the sample with an antibody that specifically binds to a β-tubulin isotype modified at cysteine residue 239; and (c) determining whether the sample contains a modified β-tubulin isotype by detecting the antibody.” This patent discloses that: “Microtubules are composed of α/β-tubulin heterodimers and constitute a crucial component of the cell cytoskeleton. Furthermore, microtubules play a pivotal role during cell division, in particular when the replicated chromosomes are separated during mitosis. Interference with the ability to form microtubules from α/β-tubulin heterodimeric subunits generally leads to cell cycle arrest. This event can, in certain cases, induce programmed cell death. Thus, natural products and organic compounds that interfere with microtubule formation have been used successfully as chemotherapeutic agents in the treatment of various human cancers.”

[0189] Published United States patent application 2002/0106705 also discloses that: “Pentafluorophenylsulfonamidobenzenes and related sulfhydryl and disulfide modifying agents (see, e.g., compound 1; 2-fluoro-1-methoxy-4-pentafluorophenylsulfonamidobenzene . . . prevent microtubule formation by selectively covalently modifying β-tubulin. For example, compound 1 does not covalently modify all of the five known β-tubulin isotypes. Instead, binding is restricted to those β-tubulin isotypes that have a cysteine residue at amino acid position 239 in β-tubulin. Such isotypes include β1, β2 and β4-tubulin. The other two isotypes (β3 and β5) have a serine residue at this particular position (Shan et al., Proc. Nat'l Acad. Sci USA 96:5686-5691 (1999)). It is notable that no other cellular proteins are modified by compound 1.”

[0190] Published United States patent application 2002/0106705 relates primarily to a “ . . . a β-tubulin isotype modified at cysteine residue 239 . . . .” Thus, at page 3 of this published patent application, in defining a “beta-tubulin modifying agent,” it describes such agent as follows: “A “β-tubulin modifying agent” refers to an agent that has the ability to specifically react with an amino acid residue of β-tubulin, preferably a cysteine, more preferably the cysteine residue at position 239 of a β-tubulin isotype such as β1- β2- or β4-tubulin and antigenic fragments thereof comprising the residue, preferably cysteine 239. The β-tubulin modifying agent of the invention can be, e.g., any sulfhydryl or disulfide modifying agent known to those of skill in the art that has the ability to react with the sulfur group on a cysteine residue, preferably cysteine residue 239 of a β-tubulin isotype. Preferably, the β-tubulin modifying agents are substituted benzene compounds, pentafluorobenzenesulfonamides, arylsulfonanilide phosphates, and derivatives, analogs, and substituted compounds thereof (see, e.g., U.S. Pat. No. 5,880,151; PCT 97/02926; PCT 97/12720; PCT 98/16781; PCT 99/13759; and PCT 99/16032, herein incorporated by reference; see also Pierce Catalogue, 1999/2000, and Means, Chemical Modification of Proteins). In one embodiment, the agent is 2-fluoro-1-methoxy-4-pentafluorophenylsulfonamidobenzene (compound 1; FIG. 1C). Modification of a β-tubulin isotype at an amino acid residue, e.g., cysteine 239, by an agent can be tested by treating a β-tubulin peptide, described herein, with the putative agent, followed by, e.g., elemental analysis for a halogen, e.g., fluorine, reverse phase HPLC, NMR, or sequencing and HPLC mass spectrometry. Optionally compound 1 described herein can be used as a positive control. Similarly, an α-tubulin modifying agent refers to an agent having the ability to specifically modify an amino acid residue of an α-tubulin.”

[0191] U.S. Pat. No. 6,541,509, the entire disclosure of which is hereby incorporated by reference into this specification, discloses a “method for treating neoplasis using combination chemotherapy.” Claim 1 of this patent describes: “A method of treating neoplasia in a subject in need of treatment, comprising administering to the subject an amount of paclitaxel effective to treat the neoplasia, in combination with an amount of discodermolide effective to treat the neoplasia, wherein a synergistic antineoplastic effect results.” At column 6 of this patent, the patentees discuss how to determine synergy between two drugs. They state that: One measure of synergy between two drugs is the combination index (CI) method of Chou and Talalay [37], which is based on the median-effect principle. This method calculates the degree of synergy, additivity, or antagonism between two drugs at various levels of cytotoxicity. Where the CI value is less than 1, there is synergy between the two drugs. Where the CI value is 1, there is an additive effect, but no synergistic effect. CI values greater than 1 indicate antagonism. The smaller the CI value, the greater the synergistic effect. Another measurement of synergy is the fractional inhibitory concentration (FIC) [48]. This fractional value is determined by expressing the IC50 of a drug acting in combination, as a function of the IC50 of the drug acting alone. For two interacting drugs, the sum of the FIC value for each drug represents the measure of synergistic interaction. Where the FIC is less than 1, there is synergy between the two drugs. An FIC value of 1 indicates an additive effect. The smaller the FIC value, the greater the synergistic interaction. In the method of the present invention, combination therapy using paclitaxel and discodermolide preferably results in an antineoplastic effect that is greater than additive, as determined by any of the measures of synergy known in the art.” The cited Chou et al. reference is an entitled “Quantitative analysis of dose effect relationships: the combined effect of multiple drugs or enzyme inhibitors,” Adv. Enzyme Regul., 11:27-56 (1984). The cited “reference 48 is an article by Hall et al., “The fractional inhibitory concentration (FIC) as a measure of synergy,” J. Antimicrob. Chemother., 11(5):427-433 (1983).

[0192] Claim 8 of U.S. Pat. No. 6,541,509 describes “A synergistic combination of antineoplastic agents, comprising an effective antimenoplastic amount of paclitaxel and an effective antineoplastic amount of discodermolide.” As one embodiment of the instant invention, applicants claims: A synergistic combination of antineoplastic agents, comprising an effective antimenoplastic amount of paclitaxel and an effective antineoplastic amount of the preferred, magnetic anti-mitotic compound of this invention. Thus, the process of such U.S. Pat. No. 6,541,509 may be adapted to use the magnetic compound of this invention instead of discodermolide.

[0193] As is disclosed in U.S. Pat. No. 6,541,509, “The present invention provides a method of treating neoplasia in a subject in need of treatment. As used herein, ‘neoplasia’ refers to the uncontrolled and progressive multiplication of cells under conditions that would not elicit, or would cause cessation of, multiplication of normal cells. Neoplasia results in the formation of a ‘neoplasm’, which is defined herein to mean any new and abnormal growth, particularly a new growth of tissue, in which the growth is uncontrolled and progressive. Malignant neoplasms are distinguished from benign in that the former show a greater degree of anaplasia, or loss of differentiation and orientation of cells, and have the properties of invasion and metastasis. Thus, neoplasia includes ‘cancer’, which herein refers to a proliferation of cells having the unique trait of loss of normal controls, resulting in unregulated growth, lack of differentiation, local tissue invasion, and metastasis.” As support for this statement, the patent cited a work by Beers and Berkow (eds.), The Merck Manual of Diagnosis and Therapy, 17^{th} edition (Whitehouse Station, N.J.; Merck Research Laboratories, 1999, 973-974, 976, 986, and 991).

[0194] As is also disclosed in U.S. Pat. No. 6,541,509, “ . . . neoplasia is treated in a subject in need of treatment by administering to the subject an amount of paclitaxel effective to treat the neoplasia, in combination with an amount of discodermolide effective to treat the neoplasia, wherein a synergistic antineoplastic effect results. The subject is preferably a mammal (e.g., humans, domestic animals, and commercial animals, including cows, dogs, monkeys, mice, pigs, and rats), and is most preferably a human.” In the embodiment described in this specification, the magnetic compound of this invention replaces discomdermolide.

[0195] As is also disclosed in U.S. Pat. No. 6,541,509, “ . . . ‘paclitaxel’ refers to paclitaxel and analogues and derivatives thereof, including, for example, a natural or synthetic functional variant of paclitaxel which has paclitaxel biological activity, as well as a fragment of paclitaxel having paclitaxel biological activity. As further used herein, the term “paclitaxel biological activity” refers to paclitaxel activity which interferes with cellular mitosis by affecting microtubule formation and/or action, thereby producing antimitotic and antineoplastic effects. Furthermore, as used herein, ‘antineoplastic’ refers to the ability to inhibit or prevent the development or spread of a neoplasm, and to limit, suspend, terminate, or otherwise control the maturation and proliferation of cells in a neoplasm.”

[0196] As is also disclosed in U.S. Pat. No. 6,541,509, “Methods of preparing paclitaxel and its analogues and derivatives are well-known in the art, and are described, for example, in U.S. Pat. Nos. 5,569,729; 5,565,478; 5,530,020; 5,527,924; 5,484,809; 5,475,120; 5,440,057; and 5,296,506. Paclitaxel and its analogues and derivatives are also available commercially. Synthetic paclitaxel, for example, can be obtained from Bristol-Myers Squibb Company, Oncology Division (Princeton, N.J.), under the registered trademark Taxol. Taxol for injection may be obtained in a single-dose vial, having a concentration of 30 mg/5 mL (6 mg/mL per 5 mL) [47]. Taxol and its analogues and derivatives have been used successfully to treat leukemias and tumors. In particular, Taxol is useful in the treatment of breast, lung, and ovarian cancers. Discodermolide and its analogues and derivatives can be isolated from extracts of the marine sponge, Discodermia dissoluta, as described, for example, in U.S. Pat. Nos. 5,010,099 and 4,939,168. Discodermolide and its analogues and derivatives also may be synthesized, as described, for example, in U.S. Pat. No. 6,096,904. Moreover, both paclitaxel and discodermolide may be synthesized in accordance with known organic chemistry procedures [46] that are readily understood by one skilled in the art.”

[0197] As is also disclosed in U.S. Pat. No. 6,541,509, “In the method of the present invention, an amount of paclitaxel or discodermolide that is ‘effective to treat the neoplasia’ is an amount that is effective to ameliorate or minimize the clinical impairment or symptoms of the neoplasia, in either a single or multiple dose. For example, the clinical impairment or symptoms of the neoplasia may be ameliorated or minimized by diminishing any pain or discomfort suffered by the subject; by extending the survival of the subject beyond that which would otherwise be expected in the absence of such treatment; by inhibiting or preventing the development or spread of the neoplasm; or by limiting, suspending, terminating, or otherwise controlling the maturation and proliferation of cells in the neoplasm. For example, doses of paclitaxel (Taxol) administered intraperitoneally may be between 1 and 10 mg/kg, and doses administered intravenously may be between 1 and 3 mg/kg, or between 135 mg/m2 and 200 mg/m2. However, the amounts of paclitaxel and discodermolide effective to treat neoplasia in a subject in need of treatment will vary depending on the particular factors of each case, including the type of neoplasm, the stage of neoplasia, the subject's weight, the severity of the subject's condition, and the method of administration. These amounts can be readily determined by the skilled artisan.”

[0198] As is also disclosed in U.S. Pat. No. 6,541,509, “The method of the present invention may be used to treat neoplasia in a subject in need of treatment. Neoplasias for which the present invention will be particularly useful include, without limitation, carcinomas, particularly those of the bladder, breast, cervix, colon, head, kidney, lung, neck, ovary, prostate, and stomach; lymphocytic leukemias, particularly acute lymphoblastic leukemia and chronic lymphocytic leukemia; myeloid leukemias, particularly acute monocytic leukemia, acute promyelocytic leukemia, and chronic myelocytic leukemia; malignant lymphomas, particularly Burkitt's lymphoma and Non-Hodgkin's lymphoma; malignant melanomas; myeloproliferative diseases; sarcomas, particularly Ewing's sarcoma, hemangiosarcoma, Kaposi's sarcoma, liposarcoma, peripheral neuroepithelioma, and synovial sarcoma; and mixed types of neoplasias, particularly carcinosarcoma and Hodgkin's disease [45]. Preferably, the method of the present invention is used to treat breast cancer, colon cancer, leukemia, lung cancer, malignant melanoma, ovarian cancer, or prostate cancer.” The aforementioned neoplasias may also be treated by the process of the instant invention.

[0199] As is also disclosed in U.S. Pat. No. 6,541,509, “In the method of the present invention, paclitaxel is administered to a subject in combination with discodermolide, such that a synergistic antineoplastic effect is produced. A ‘synergistic antineoplastic effect’ refers to a greater-than-additive antineoplastic effect which is produced by a combination of two drugs, and which exceeds that which would otherwise result from individual administration of either drug alone. Administration of paclitaxel in combination with discodermolide unexpectedly results in a synergistic antineoplastic effect by providing greater efficacy than would result from use of either of the antineoplastic agents alone. Discodermolide enhances paclitaxel's effects. Therefore, lower doses of one or both of the antineoplastic agents may be used in treating neoplasias, resulting in increased therapeutic efficacy and decreased side-effects.” As will be apparent, in applicants' invention the discodermolide is replaced by the magnetic anti-mitotic compound described in this specification.

[0200] As is also disclosed in U.S. Pat. No. 6,541,509, “Discodermolide also may provide a means to circumvent clinical resistance due to overproduction of P-glycoprotein. Accordingly, the combination of paclitaxel and discodermolide may be advantageous for use in subjects who exhibit resistance to paclitaxel (Taxol). Since Taxol is frequently utilized in the treatment of human cancers, a strategy to enhance its utility in the clinical setting, by combining its administration with that of discodermolide, may be of great benefit to many subjects suffering from malignant neoplasias, particularly advanced cancers.” The comments made regarding discodermolide are equally applicable to applicants' magnetic anti-mitotic agent.

[0201] As is also disclosed in U.S. Pat. No. 6,541,509, “In the method of the present invention, administration of paclitaxel ‘in combination with’ discodermolide refers to co-administration of the two antineoplastic agents. Co-administration may occur concurrently, sequentially, or alternately. Concurrent co-administration refers to administration of both paclitaxel and discodermolide at essentially the same time. For concurrent co-administration, the courses of treatment with paclitaxel and with discodermolide may be run simultaneously. For example, a single, combined formulation, containing both an amount of paclitaxel and an amount of discodermolide in physical association with one another, may be administered to the subject. The single, combined formulation may consist of an oral formulation, containing amounts of both paclitaxel and discodermolide, which may be orally administered to the subject, or a liquid mixture, containing amounts of both paclitaxel and discodermolide, which may be injected into the subject.” The same means of administration may be used in the process of the instant invention.

[0202] As is also disclosed in U.S. Pat. No. 6,541,509, “It is also within the confines of the present invention that an amount of paclitaxel and an amount of discodermolide may be administered concurrently to a subject, in separate, individual formulations. Accordingly, the method of the present invention is not limited to concurrent co-administration of paclitaxel and discodermolide in physical association with one another.” The same means of administration may be used in the process of the instant invention.

[0203] As is also disclosed in U.S. Pat. No. 6,541,509, “In the method of the present invention, paclitaxel and discodermolide also may be co-administered to a subject in separate, individual formulations that are spaced out over a period of time, so as to obtain the maximum efficacy of the combination. Administration of each drug may range in duration from a brief, rapid administration to a continuous perfusion. When spaced out over a period of time, co-administration of paclitaxel and discodermolide may be sequential or alternate. For sequential co-administration, one of the antineoplastic agents is separately administered, followed by the other. For example, a full course of treatment with paclitaxel may be completed, and then may be followed by a full course of treatment with discodermolide. Alternatively, for sequential co-administration, a full course of treatment with discodermolide may be completed, then followed by a full course of treatment with paclitaxel. For alternate co-administration, partial courses of treatment with paclitaxel may be alternated with partial courses of treatment with discodermolide, until a full treatment of each drug has been administered.” The same means of administration may be used in the process of the instant invention.

[0204] As is also disclosed in U.S. Pat. No. 6,541,509, “The antineoplastic agents of the present invention (i.e., paclitaxel and discodermolide, either in separate, individual formulations, or in a single, combined formulation) may be administered to a human or animal subject by known procedures, including, but not limited to, oral administration, parenteral administration (e.g., intramuscular, intraperitoneal, intravascular, intravenous, or subcutaneous administration), and transdermal administration. Preferably, the antineoplastic agents of the present invention are administered orally or intravenously.” The same means of administration may be used in the process of the instant invention.

[0205] As is also disclosed in U.S. Pat. No. 6,541,509, “For oral administration, the formulations of paclitaxel and discodermolide (whether individual or combined) may be presented as capsules, tablets, powders, granules, or as a suspension. The formulations may have conventional additives, such as lactose, mannitol, corn starch, or potato starch. The formulations also may be presented with binders, such as crystalline cellulose, cellulose derivatives, acacia, corn starch, or gelatins. Additionally, the formulations may be presented with disintegrators, such as corn starch, potato starch, or sodium carboxymethyl-cellulose. The formulations also may be presented with dibasic calcium phosphate anhydrous or sodium starch glycolate. Finally, the formulations may be presented with lubricants, such as talc or magnesium stearate.” The same means of administration may be used in the process of the instant invention.

[0206] As is also disclosed in U.S. Pat. No. 6,541,509, “For parenteral administration, the formulations of paclitaxel and discodermolide (whether individual or combined) may be combined with a sterile aqueous solution which is preferably isotonic with the blood of the subject. Such formulations may be prepared by dissolving a solid active ingredient in water containing physiologically-compatible substances, such as sodium chloride, glycine, and the like, and having a buffered pH compatible with physiological conditions, so as to produce an aqueous solution, then rendering said solution sterile. The formulations may be presented in unit or multi-dose containers, such as sealed ampules or vials. Moreover, the formulations may be delivered by any mode of injection, including, without limitation, epifascial, intracapsular, intracutaneous, intramuscular, intraorbital, intraperitoneal (particularly in the case of localized regional therapies), intraspinal, intrasternal, intravascular, intravenous, parenchymatous, or subcutaneous.” The same means of administration may be used in the process of the instant invention.

[0207] As is also disclosed in U.S. Pat. No. 6,541,509, “For transdermal administration, the formulations of paclitaxel and discodermolide (whether individual or combined) may be combined with skin penetration enhancers, such as propylene glycol, polyethylene glycol, isopropanol, ethanol, oleic acid, N-methylpyrrolidone, and the like, which increase the permeability of the skin to the antineoplastic agent, and permit the antineoplastic agent to penetrate through the skin and into the bloodstream. The antineoplastic agent/enhancer compositions also may be further combined with a polymeric substance, such as ethylcellulose, hydroxypropyl cellulose, ethylene/vinylacetate, polyvinyl pyrrolidone, and the like, to provide the composition in gel form, which may be dissolved in a solvent such as methylene chloride, evaporated to the desired viscosity, and then applied to backing material to provide a patch.” The same means of administration may be used in the process of the instant invention.

[0208] As is also disclosed in U.S. Pat. No. 6,541,509, “It is within the confines of the present invention that the formulations of paclitaxel and discodermolide (whether individual or combined) may be further associated with a pharmaceutically-acceptable carrier, thereby comprising a pharmaceutical composition. The pharmaceutically-acceptable carrier must be “acceptable” in the sense of being compatible with the other ingredients of the composition, and not deleterious to the recipient thereof. Examples of acceptable pharmaceutical carriers include Cremophor™. (a common vehicle for Taxol), as well as carboxymethyl cellulose, crystalline cellulose, glycerin, gum arabic, lactose, magnesium stearate, methyl cellulose, powders, saline, sodium alginate, sucrose, starch, talc, and water, among others. Formulations of the pharmaceutical composition may conveniently be presented in unit dosage.” The same means of administration may be used in the process of the instant invention.

[0209] As is also disclosed in U.S. Pat. No. 6,541,509, “The formulations of the present invention may be prepared by methods well-known in the pharmaceutical art. For example, the active compound may be brought into association with a carrier or diluent, as a suspension or solution. Optionally, one or more accessory ingredients (e.g., buffers, flavoring agents, surface active agents, and the like) also may be added. The choice of carrier will depend upon the route of administration. The pharmaceutical composition would be useful for administering the antineoplastic agents of the present invention (i.e., paclitaxel and discodermolide, and their analogues and derivatives, either in separate, individual formulations, or in a single, combined formulation) to a subject to treat neoplasia. The antineoplastic agents are provided in amounts that are effective to treat neoplasia in the subject. These amounts may be readily determined by the skilled artisan.” Similar formulations may be used in the process of the instant invention.

[0210] As is also disclosed in U.S. Pat. No. 6,541,509, “It is also within the confines of the present invention that paclitaxel and discodermolide be co-administered in combination with radiation therapy or an antiangiogenic compound (either natural or synthetic). Examples of antiangiogenic compounds with which paclitaxel and discodermolide may be combined include, without limitation, angiostatin, tamoxifen, thalidomide, and thrombospondin.” Similar compositions may be used in the process of the instant invention.

[0211] As is also disclosed in U.S. Pat. No. 6,541,509, “The present invention further provides a synergistic combination of antineoplastic agents. As defined above, ‘antineoplastic’ refers to the ability to inhibit or prevent the development or spread of a neoplasm, and to limit, suspend, terminate, or otherwise control the maturation and proliferation of cells in a neoplasm. As used herein, a “synergistic combination of antineoplastic agents” refers to a combination of antineoplastic agents that achieves a greater antineoplastic effect than would otherwise result if the antineoplastic agents were administered individually. Additionally, as described above, the “antineoplastic agents” of the present invention are paclitaxel and discodermolide, and their analogues and derivatives, either in separate, individual formulations, or in a single, combined formulation. Administration of paclitaxel in combination with discodermolide unexpectedly results in a synergistic antineoplastic effect by providing greater efficacy than would result from use of either of the antineoplastic agents alone.” Similar synergistic combinations may be used in the process of the instant invention.

[0212] As is also disclosed in U.S. Pat. No. 6,541,509, “In the synergistic combination of the present invention, paclitaxel and discodermolide may be combined in a single formulation, such that the amount of paclitaxel is in physical association with the amount of discodermolide. This single, combined formulation may consist of an oral formulation, containing amounts of both paclitaxel and discodermolide, which may be orally administered to the subject, or a liquid mixture, containing amounts of both paclitaxel and discodermolide, which may be injected into the subject.” Similar synergistic combinations may be used in the process of the instant invention.

[0213] As is also disclosed in U.S. Pat. No. 6,541,509, “Alternatively, in the synergistic combination of the present invention, a separate, individual formulation of paclitaxel may be combined with a separate, individual formulation of discodermolide. For example, an amount of paclitaxel may be packaged in a vial or unit dose, and an amount of discodermolide may be packaged in a separate vial or unit dose. A synergistic combination of paclitaxel and discodermolide then may be produced by mixing the contents of the separate vials or unit doses in vitro. Additionally, a synergistic combination of paclitaxel and discodermolide may be produced in vivo by co-administering to a subject the contents of the separate vials or unit doses, according to the methods described above. Accordingly, the synergistic combination of the present invention is not limited to a combination in which amounts of paclitaxel and discodermolide are in physical association with one another in a single formulation.” Similar synergistic combinations may be used in the process of the instant invention.

[0214] As is also disclosed in U.S. Pat. No. 6,541,509, “The synergistic combination of the present invention comprises an effective antineoplastic amount of paclitaxel and an effective antineoplastic amount of discodermolide. As used herein, an ‘effective antineoplastic amount’ of paclitaxel or discodermolide is an amount of paclitaxel or discodermolide that is effective to ameliorate or minimize the clinical impairment or symptoms of neoplasia in a subject, in either a single or multiple dose. For example, the clinical impairment or symptoms of neoplasia may be ameliorated or minimized by diminishing any pain or discomfort suffered by the subject; by extending the survival of the subject beyond that which would otherwise be expected in the absence of such treatment; by inhibiting or preventing the development or spread of the neoplasm; or by limiting, suspending, terminating, or otherwise controlling the maturation and proliferation of cells in the neoplasm.” These comments are equally applicable to the process of the instant invention, in which discodermolide is replaced by the magnetic anti-mitotic compound of this invention.

[0215] As is also discussed in U.S. Pat. No. 6,541,509, “The effective antineoplastic amounts of paclitaxel and discodermolide will vary depending on the particular factors of each case, including the type of neoplasm, the stage of neoplasia, the subject's weight, the severity of the subject's condition, and the method of administration. For example, effective antineoplastic amounts of paclitaxel (Taxol) administered intraperitoneally may range from 1 to 10 mg/kg, and doses administered intravenously may range from 1 to 3 mg/kg, or from 135 mg/m2 to 200 mg/m2. Nevertheless, the appropriate effective antineoplastic amounts of paclitaxel and discodermolide can be readily determined by the skilled artisan.” These comments are equally applicable to the process of the instant invention, in which discodermolide is replaced by the magnetic anti-mitotic compound of this invention

[0216] As is also disclosed in U.S. Pat. No. 6,541,509, “The synergistic combination described herein may be useful for treating neoplasia in a subject in need of treatment. Paclitaxel and discodermolide, which comprise the synergistic combination of the present invention, may be co-administered to a subject concurrently, sequentially, or alternately, as described above. Moreover, the paclitaxel and discodermolide of the present invention may be administered to a subject by any of the methods, and in any of the formulations, described above.” These comments are equally applicable to the process of the instant invention, in which discodermolide is replaced by the magnetic anti-mitotic compound of this invention

[0217] By way of yet further illustration, and referring to published United States patent application 2003/0235855 (the entire disclosure of which is hereby incorporated by reference into this specification), claims an assay for the detection of paclitaxel resistant cells in human tumors. Claim 4 of this published patent application, which is typical, claims: “An isolated tubulin amino acid sequence comprising an amino acid sequence having at least one mutation, the mutation selected from the group consisting of a mutation at position 210, a mutation at position 214, a mutation at position 215, a mutation at position 216, a mutation at position 217, a mutation at position 225, a mutation at position 228, a mutation at position 270, a mutation at position 273, a mutation at position 292, and a mutation at position 365 and any combination thereof.”

[0218] At page 1 of published United States patent application 2003/0235855, the importance of paclitaxel is discussed. It is disclosed that “Paclitaxel (Taxol), Taxotere and other paclitaxel-like drugs that are currently under development hold great promise for the treatment of human cancer. Paclitaxel has shown remarkable activity against breast and ovarian cancer, melanomas, non-small lung carcinoma, esophogeal cancer, Kaposi's sarcoma, and some hematological malignancies. It has been described as the most significant antitumor drug developed in the last several decades and will, without doubt, find widespread use in the treatment of cancer. However, as is true of virtually all cancer chemotherapeutic drugs, patients responsive to paclitaxel eventually relapse due to the emergence of drug resistant tumor cells. Thus, there is a need in the art for methods to identify paclitaxel-resistant tumor cells, for agents that allow such identifications in a simple and cost effective way, and for methods for to treat patients with paclitaxel resistant tumor cells.” The solution presented to this problem in such published patent application is also described at page 1 thereof, wherein it is stated that: “The present invention involves polynucleotide mutations which confer paclitaxel resistance; mutant cells which are paclitaxel resistant; and methods to determine paclitaxel resistance. The present invention also provides a simple assay with sufficient sensitivity to detect drug resistant cells in tumor biopsies by extracting polynucleotide from the tissue. The extracted polynucleotide is then hybridized to mutant-specific PCR primers and the mutant regions of tubulin are identified by selective amplification. Once identified, a secondary treatment protocol can be administered to the patient to aid in tumor treatment.”

[0219] At pages 2 et seq. of published United States patent application 2003/0235855, the inventor discloses that “ . . . mutations able to convert resistance to paclitaxel are clustered in several small regions of beta-tubulin.” In paragraphs 0022 et seq., it is disclosed that: “The inventor has found that mutations able to confer resistance to paclitaxel are clustered in several small regions of β-tubulin (Tables I-III) including I210T, T214A, L215H, L215R, L215F, L215A, L215E, L215M, L215P, K216A, L217R, L217N, L217A, L225M, L228A, L228F, L228H, F270C, L273V, Q292H, and V365D. Of these 21 identified and sequenced mutant tubulins, 15 or 62% have a substitution at leucine including locations 215, 217, 225, 228 and 273. Of the 15 total leucine mutants, 7 or 46.7% occur at leu215, 3 or 20% occur at leu217, 3 or 20% occur at leu228, 1 or 6.7% occur at leu225 and 1 or 6.7% occur at leu273. The ability of 19 of the 21 total mutations to confer paclitaxel resistance has been confirmed by transfecting mutant cDNAs into wild-type cells.”

[0220] It is also disclosed in published United States patent application 2003/0235855 (commencing at page 3 thereof) that: “The clustering of mutations affecting leucines is unusual and unexpected. Also unexpected is the three relatively localized regions of mutation, 210-217, 225-228, and 270-273, and two isolated sites of mutations, 292 and 365. Although some of these regions appear distant in the primary structure, they are actually close together in the tertiary structure of β-tubulin. The data support the hypothesis that the mutations affect a critical interaction between tubulin subunits necessary for microtubule assembly and that the mechanism of paclitaxel is to facilitate this interaction.” Thereafter, in the middle of page 3 of such patent application, Table 1 is presented.

[0221] It is also disclosed in published United States patent application 2003/0235855 (commencing at page 3 thereof) that: “Table V below contains the corresponding β-tubulin protein sequences for the variants listed in Table I: L215H (Seq. No. 10); L215R (Seq. No. 11); L215F (Seq. No. 12); L217R (Seq. No. 13); L228F (Seq. No. 14); and L228H (Seq. No. 15). All of these mutations result in amino acid substitutions at 3 leucine residues that are within 14 amino acids of one another.” The aforementioned Seq. No. 10, 11, 12, 13, 14, and 15 are listed in this application's sequence listing as SEQ. ID. No. 293, 294, 295, 296, 297 and 298 respectively.

[0222] It is also disclosed in published United States patent application 2003/0235855 (commencing at page 3 thereof) that: “Using site-directed mutagenesis, the inventor has identified additional mutations in the H6/H7 loop of beta tubulin (that contains L215 and L217) that confer paclitaxel resistance. Table II lists the cell line, a portion of the encoding region including the mutated codon and the protein alteration.” Thereafter, Table II is presented on page 3 of the patent application.

[0223] It is also disclosed in published United States patent application 2003/0235855 (commencing at page 4 thereof) that: “The corresponding β-tubulin protein sequences (see Table IV) are: T214A (Seq. No. 24), L215A (Seq. No. 25), L215E (Seq. No. 26), L215M (Seq. No. 27), L215P (Seq. No. 28), K216A (Seq. No. 29), L217A (Seq. No. 30) and L228A (Seq. No. 31). The present invention also relates to probes having at least 12 bases including the codon for the particular amino acid substitution.” The aforementioned Seq. No. 24, 25, 26, 27, 28, 29, 30 and 31 are listed in this application's sequence listing as SEQ. ID. No. 299, 300, 301, 302, 303, 304, 305, and 306 respectively.

[0224] It is also disclosed in published United States patent application 2003/0235855 (commencing at page 3 thereof) that: “More recently, the inventor has found that the number of mutations that confer resistance to paclitaxel are likely to be small and that most are clustered in a small region of β-tubulin. The likelihood that only a relatively small number of mutations will cause paclitaxel resistance is indicated by the observation that a random mutagenesis approach to find new mutations is recapitulating mutations that have already been found by classical genetics, and by the observation that mutations reported in different laboratories using different cell lines are beginning to show overlap. New mutants recently identified by the inventor in both CHO cells, and in the human KB3 cervical carcinoma cell line, are summarized in Table m. The fact that human mutations fall into the same region as the CHO mutations in the tertiary structure, combined with the observation that some mutations (not reported in this application) in CHO cells affect residues that are altered in human cell lines, supports the conclusion (based on identical amino acid sequences for β-tubulin in the two species) that mutations identified in CHO cells are expected to confer drug resistance in human cells. The nucleotide sequences encoding the new mutants are shown in Table III.3 TABLE III” Thereafter, Table III is represented on page 4.

[0225] It is also disclosed in published United States patent application 2003/0235855 (commencing at page 4 thereof) that: “The new corresponding mutant CHO β-tubulin protein sequences (see Table IV) are: 1210T (Ile to Thr at location 210) (Seq. No. 39), L217N (Leu to Asn at location 217) (Seq. No. 40), F270C (Phe to Cys at location 270) (Seq. No. 41) and Q292H (Gln to His at location 292) (Seq. No. 42). The new corresponding mutant human β-tubulin sequences are: L225M (Leu to Met at location 225) (Seq. No.43), L273V (Leu to Val at location 273) (Seq. No. 44) and V365D (Val to Asp at location 365) (Seq. No. 45).” The aforementioned Seq. No.39, 40, 41, 42, 43, 44, and 45 are listed in this application's sequence listing as SEQ. ID. No. 307, 308, 309, 310, 311, 312, and 313 respectively.

[0226] It is also disclosed in published United States patent application 2003/0235855 (commencing at page 4 thereof) that: “Table IV lists all of the nucleic acid and protein sequences in sequence order that are described in this application along with their sequence id number and abbreviated amino acid mutation.” Thereafter, Table IV is presented on pages 4 et seq.

[0227] It is also disclosed in United States published patent application 2003/0235855 (commencing at page 8 thereof) that: “Because α-tubulin and β-tubulin are similar proteins, similar clustering of mutations are anticipated in α-tubulin in paclitaxel resistant cells and α-tubulin PCR mutant primer sequences can be constructed in a similar manner to the primers presented herein for β-tubulin in paclitaxel resistant tumor cells.”

[0228] It is also disclosed in United States published patent application 2003/0235855 (commencing at page 8 thereof) that: “The assays of the present invention were performed using Chinese hamster ovary (CHO) cells selected for resistance to paclitaxel. It is important to note that human and hamster tubulin have identical amino acid sequences and the nucleotide sequences are highly homologous and the nucleotide differences do not alter the amino acid sequence, and therefore, the amino acid changes found in mutant CHO cells will also confer resistance in humans.”

[0229] It is also disclosed in United States published patent application 2003/0235855 (commencing at page 8 thereof) that: “It has been established that the most frequent mechanism of resistance to paclitaxel occurs through mutations in tubulin that affect the stability of the microtubules. These paclitaxel-resistant cells assemble less microtubule polymer and are frequently hypersensitive to other drugs such as vinblastine and vincristine that inhibit microtubule assembly.”

[0230] It is also disclosed in United States published patent application 2003/0235855 (commencing at page 8 thereof) that: “A model to explain these observations is provided in FIG. 1. The assay of the present invention can be used to identify many or most patients in danger of relapse due to tumor cell mutation and allow administration of alternate or additional treatment protocols using such agents as vinblastine or vincristine which are highly effective in eliminating the paclitaxel-resistant cells.”

[0231] It is also disclosed in United States published patent application 2003/0235855 (commencing at page 8 thereof) that: “The identification of the mutations and the clustering of mutations within the tubulin genes provide the data to construct highly efficient assays to detect these mutations in patients. Until now, there has been no method available to easily detect paclitaxel resistant cells in human tumors. The present methods or assays involve the design and use of allele-specific oligonucleotide primers for PCR.”

[0232] It is also disclosed in United States published patent application 2003/0235855 (commencing at page 8 thereof) that: “One such assay has been successfully confirmed for primers using the leu217 to arg mutation shown in FIG. 2. The wild-type primer (CTCCGTAGGTGGGCGTGGTGA (Seq. No.46)) is able to amplify wild-type DNA; but because of a 3′ mismatch with the mutant allele, it fails to amplify mutant DNA. Conversely, the mutant primer (CTCCGTAGGTGGGCGTGCGC (Seq. No. 47)) is able to amplify mutant DNA, but does not amplify the wild-type DNA because of 3′ mismatch (underlined). The mutant primer also contains an intentional mismatch to both wild-type and mutant DNA at the third nucleotide from the 3′ end (underlined) in order to enhance its allele specificity.” The aforementioned Seq. No. 46 and 47 are listed in this application's sequence listing as SEQ. ID. No. 314 and 315 respectively.

[0233] It is also disclosed in United States published patent application 2003/0235855 (commencing at page 8 thereof) that: “Thus, allele-specific primers covering most potential mutations can be used individually or a ‘cocktails’ to detect the mutations in a single or very few PCR reactions. Alternatively, assays involving restriction enzyme digestion or allele-specific hybridization using the mutant DNA sequences can be used, but may lack the sensitivity and simplicity of the PCR assay.”

[0234] It is also disclosed in United States published patent application 2003/0235855 (commencing at page 9 thereof) that: “The high frequency of mutations affecting only a few leucine residues of α-tubulin in paclitaxel-resistant mutants was unexpected. Currently, there is no rational basis for predicting how an individual patient will respond to paclitaxel therapy. An initial assay of the tumor for mutations in tubulin that confer paclitaxel resistance would help clinicians decide whether the patient is a good candidate for paclitaxel therapy and save needless morbidity with a treatment that is unlikely to be effective. It would also allow the clinician to choose an alternative or additional therapy at an early time in the disease progression, thereby enhancing the survival of the patient.”

[0235] It is also disclosed in United States published patent application 2003/0235855 (commencing at page 9 thereof) that: “Mammals express 6 α- and 6 β-tubulin genes, which are the targeted genes. To further optimize assays, it may be necessary to determine which tubulin isotype is involved in paclitaxel resistance for each type of tumor in certain instances. The tubulin is expressed in a tissue specific manner, with some forms restricted to certain tissues, which are widely disclosed in the prior art literature. Furthermore, the present inventors have found in CHO cells that the most abundant tubulin isotype is the one always involved in conferring resistance, which was completely unexpected. Thus, one skilled in the art must merely find the most abundant isotype for each type of tumor, which is disclosed in many technical journal and prior art references.”

[0236] It is also disclosed in United States published patent application 2003/0235855 (commencing at page 9 thereof) that: “Paclitaxel is the prototype for a novel class of agents that inhibit cells in mitosis by promoting and stabilizing microtubule assembly. Early studies with this compound demonstrated that it binds to microtubules in a 1:1 stoichiometry with tubulin heterodimers (Manfredi, J. J., Parness, J., and Horwitz, S. B. (1981) J. Cell Biol. 94, 688-696) and inhibits microtubule disassembly. It is also able to induce microtubule assembly both in vitro and in vivo and induces microtubule bundle formation in treated cells (Schiff, P. B., Fant, J., and Horwitz, S. B. (1979) Nature 277, 665-667 and Schiff, P. B., and Horwitz, S. B. (1980) Proc. Natl. Acad. Sci. U.S.A. 77, 1561-1565). Recent interest in this and related compounds has been fueled by clinical studies demonstrating remarkable activity of paclitaxel against a number of malignant diseases (Rowinsky, E. K., and Donehower, R. C. (1995) N. E. J. Med. 332, 1004-1014). Although still in clinical trials, the demonstrated activity of paclitaxel in phase II studies has led to FDA approval for its use in refractory cases of breast and ovarian cancer. As more patients are treated with this drug, clinical resistance is expected to become an increasingly significant problem.”

[0237] It is also disclosed in United States published patent application 2003/0235855 (commencing at page 9 thereof) that: “The mechanisms by which tumor cells acquire resistance to paclitaxel are not fully understood. Cell culture studies have shown that paclitaxel is a substrate for the multidrug resistance pump (gP170), and cells selected for high levels of resistance to the drug have increased gP170 (Casazza, A. M., and Fairchild, C. R. (1996) Cancer Treatment & Research 87, 149-71). Nevertheless, it has yet to be demonstrated that this mechanism is significant in paclitaxel refractory tumors. Indeed, the remarkable efficacy of paclitaxel in early clinical studies of patients who were pretreated with Adriamycin, a well known substrate for gP170, argues that the multidrug resistance (mdr) phenotype may not be as clinically prevalent as had initially been anticipated (Schiff, P. B., and Horwitz, S. B. (1980) Proc. Natl. Acad. Sci. U.S.A. 77, 1561-1565).”

[0238] It is also disclosed in United States published patent application 2003/0235855 (commencing at page 9 thereof) that: “Additional mechanisms of resistance to paclitaxel have been reported. For example, several laboratories have provided evidence that changes in the expression of specific β-tubulin genes are associated with paclitaxel resistance in cultured tumor cell lines (Haber, M., Burkhart, C. A., Regl, D. L., Madafiglio, J., Norris, M. D., and Horwitz, S. B. (1995) J. Biol. Chem. 270, 31269-75; Jaffrezou, J. P., Dumontet, C., Derry, W. B., Duran, G., Chen, G., Tsuchiya, E., Wilson, L., Jordan, M. A., and Sikic, B. I. (1995) Oncology Res. 7, 517-27; Kavallaris, M., Kuo, D. Y. S., Burkhart, C. A., Regl, D. L., Norris, M. D., Haber, M., and Horwitz, S. B. (1997) J. Clin. Invest. 100, 1282-93; and Ranganathan, S., Dexter, D. W., Benetatos, C. A., and Hudes, G. R. (1998) Biochim. Biophys. Acta 1395, 237-245). More recently, a report describing mutations in β-tubulin that make the protein unresponsive to paclitaxel has appeared (Giannakakou, P., Sackett, D. L., Kang, Y.-K., Zhan, Z., Buters, J. T. M., Fojo, T., and Poruchynsky, M. S. (1997) J. Biol. Chem. 272, 17118-17125). To date, however, there is little evidence that any of the mechanisms described in cell culture cause paclitaxel resistance in human tumors.”

[0239] It is also disclosed in United States published patent application 2003/0235855 (commencing at page 9 thereof) that “The inventor's own studies have described a resistance mechanism mediated by tubulin alterations that affect microtubule assembly (Cabral, F., and Barlow, S. B. (1991) Pharmac. Ther. 52, 159-171). Based on mutant properties and drug cross-resistance patterns, it is proposed that these changes in microtubule assembly could compensate for the presence of the drug (Cabral, F., Brady, R. C., and Schibler, M. J. (1986) Ann. N.Y. Acad. Sci. 466, 745-756). The inventors were later able to directly demonstrate that paclitaxel resistant Chinese hamster ovary (CHO) cells have diminished microtubule assembly compared to wild-type controls (Minotti, A. M., Barlow, S. B., and Cabral, F. (1991) J. Biol. Chem. 266, 3987-3994). Thus, isolation of paclitaxel resistant mutants provides an opportunity to study mutations that not only give information about the mechanisms of drug action and resistance, but also give structural information about regions of tubulin that are involved in assembly.”

[0240] It is also disclosed in United States published patent application 2003/0235855 (commencing at page 10 thereof) that: “The inventors have now sequenced 9 mutant β-tubulin alleles and find that the mutations cluster at a site that is likely to be involved in lateral or longitudinal interactions during microtubule assembly. Remarkably, these mutations are present in the H6H7 region of tubulin. Previously, it was believed that this region was not associated with paclitaxel binding. However, the inventors have isolated mutants in the H6H7 region, which are directly related to paclitaxel resistence.”

[0241] It is also disclosed in United States published patent application 2003/0235855 (commencing at page 10 thereof) that: “There is some significance to the fact that all the mutated residues are leucines—it certainly indicates that the changes that produce taxol resistance are not random. One possibility is that the leucines define a structural motif (e.g., analogous to a leucine zipper, but clearly distinct) that forms an interaction site with a neighboring subunit. A more trivial explanation is that the leucines are among the least critical residues in the region and are therefore better able to tolerate changes that produce the kind of subtle alterations in tubulin assembly that give resistance to taxol. The fact that the 3 leucines are highly conserved throughout all species and that the conservation extends to alpha and even gamma tubulin would tend to argue for the former alternative, but it will take a lot of further experimentation before the true significance can be elucidated.”

[0242] It is also disclosed in United States published patent application 2003/0235855 (commencing at page 10 thereof) that: “All 3 leucines in hamster are encoded by a CTC. Thus, a single base change can lead to substitution of histidine, arginine, phenylalanine, isoleucine, valine, or pro line. Only his, arg, and phe were isolated in the mutant cell lines. By transfection of cDNA altered by site-directed mutagenesis, is has been found that ile and val do not produce taxol resistance, probably because they do not perturb the structure of the microtubule sufficiently to produce resistance. Proline substitution can cause resistance, but appears to do so when expressed at very low levels. Moreover, the inventors have not been able to express it at high levels. This suggests that pro was not isolated in the mutant cell lines because it disrupts the structure of microtubules too severely for the cells to survive.”

[0243] It is also disclosed in United States published patent application 2003/0235855 (commencing at page 10 thereof) that: “The codons for leucine in human DNA are CTG at positions 215 and 217, and CTT at position 228. Single nucleotide changes will produce the same amino acid substitutions at 228, but a different set (valine, methionine, glutamine, arginine, or proline) at 215 and 217. Thus, 2 new possibilities (methionine and glutamine) might be found at 215 or 217 in human cells resistant to taxol. Of the two, methionine has been tested by transfection and it turns out to produce borderline resistance even at high levels of expression. A glutamine substitution has not yet been tested and should therefore be considered a presumptive candidate for producing resistance.”

A Preferred Anti-Mitotic Compound

[0244] In this section of the specification, a preferred compound is discussed. The preferred compound of this embodiment of the invention is an anti-mitotic compound. Anti-mitotic compounds are known to those skilled in the art. Reference may be had, e.g., to U.S. Pat. No. 6,723,858 (estrogenic compounds as anti-mitotic agents), U.S. Pat. No. 6,528,676 (estrogenic compounds as anti-mitotic agents), U.S. Pat. No. 6,350,777 (anti-mitotic agents which inhibit tubulin polymerization), U.S. Pat. No. 6,162,930 (anti-mitotic agents which inhibit tubulin polymerization), U.S. Pat. No. 5,892,069 (estrogenic compounds as anti-mitotic agents), U.S. Pat. No. 5,886,025 (anti-mitotic agents which inhibit tubulin polymerization), U.S. Pat. No. 5,661,143 (estrogenic compounds as anti-mitotic agents), U.S. Pat. No. 3,997,506 (anti-mitotic derivatives of thiocolchicine), and the like. The entire disclosure of each of these United States patents applications is hereby incorporated by reference into this specification.

[0245] These prior art anti-mitotic agents may be modified, in accordance with the process of this invention, to make them “magnetic,” as that term is defined in this specification. In the next section of this specification, a process for modifying prior art taxanes to make them “magnetic” is described.

Preparation and Use of Magnetic Taxanes

[0246] In this portion of the specification, applicants will describe the preparation of certain magnetic taxanes that may be used in one or more of the processes of his invention. The process that is used to make such taxanes magnetic and/or water soluble may also be used to make other anti-mitotic compounds magnetic and/or water soluble.

[0247] In one embodiment of the invention, a biologically active substrate is linked to a magnetic carrier particle. An external magnetic field may then be used to increase the concentration of a magnetically linked drug at a predetermined location.

[chemical structure]

[0248] One method for the introduction of a magnetic carrier particle involves the linking of a drug with a magnetic carrier. While some naturally occurring drugs inherently carry magnetic particles (ferrimycin, albomycin, salmycin, etc.), it is more common to generate a synthetic analog of the target drug and attach the magnetic carrier through a linker.

Functionalized Taxanes

[0249] Paclitaxel and docetaxel are members of the taxane family of compounds. A variety of taxanes have been isolated from the bark and needles of various yew trees

[0250] In one embodiment of the invention, such a linker is covalently attached to at least one of the positions in taxane.

[chemical structure]

[0251] It is well known in the art that the northern hemisphere of taxanes has been altered without significant impact on the biological activity of the drug. Reference may be had to Chapter 15 of Taxane Anticancer Agents, Basic Science and Current Status, edited by G. George et al., ACS Symposium Series 583, 207^{th} National Meeting of the American Chemical Society, San Diego, Calif. (1994). Specifically the C-7, C-9, and C-10 positions of paclitaxel have been significantly altered without degrading the biological activity of the parent compound. Likewise the C-4 position appears to play only a minor role. The oxetane ring at C-4 to C-5 has been shown to be critical to biological activity. Likewise, certain functional groups on the C-13 sidechain have been shown to be of particular importance.

[0252] In one embodiment of the invention, a position within paclitaxel is functionalized to link a magnetic carrier particle. A number of suitable positions are presented below. It should be understood that paclitaxel is illustrated in the figures below, but other taxane analogs may also be employed. [chemical structure] [chemical structure]
Attachment at C-4

[0253] C-4 taxane analogs have been previously generated in the art. A wide range of methodologies exist for the introduction of a variety of substituents at the C-4 position. By way of illustration, reference may be had to “Synthesis and Biological Evaluation of Novel C-4 Aziridine-Bearing Paclitaxel Analogs” by S. Chen et al., J. Med. Chem. 1995, vol 38, pp 2263.

[chemical structure]

[0254] The secondary (C-13) and tertiary (C-1) alcohols of 7-TES baccatin were protected using the procedure of Chen (J. Org. Chem. 1994, vol 59, p 6156) while simultaneously unmasking the alcohol at C-4. The resulting product was treated with a chloroformate to yield the corresponding carboxylate. Removal of the silyl protecting groups at C-1, C-7, and C-13, followed by selective re-protection of the C-7 position gave the desired activated carboxylate. The compound was then treated with a suitable nucleophile (in the author's case, ethanolamine) to produce a C-4 functionalized taxane. The C-13 sidechain was installed using standard lactam methodology.

[0255] This synthetic scheme thus provides access to a variety of C-4 taxane analogs by simply altering the nucleophile used. In one embodiment of the instant invention, the nucleophile is selected so as to allow the attachment of a magnetic carrier to the C-4 position.

Attachment at C-7

[0256] The C-7 position is readily accessed by the procedures taught in U.S. Pat. No. 6,610,860. The alcohol at the C-10 position of 10-deacetylbaccatin III was selectively protected. The resulting product was then allowed to react with an acid halide to produce the corresponding ester by selectively acylating the C-7 position over the C-13 alcohol. Standard lactam methodology allowed the installation of the C-13 sidechain. In another embodiment, baccatin III, as opposed to its deacylated analog, is used as the starting material.

[chemical structure]

[0257] Other C-7 taxane analogs are disclosed in U.S. Pat. Nos. 6,610,860; 6,359,154; and 6,673,833, the contents of which are hereby incorporated by reference.

Attachment at C-9

[0258] It has been established that the C-9 carbonyl of paclitaxel is relatively chemically inaccessible, although there are exceptions (see, for example, Tetrahedron Lett. Vol 35, p 4999). However, scientists gained access to C-9 analogs when 13-acetyl-9-dihydrobaccatin III was isolated from Taxus candidensis (see J. Nat. Products, 1992, vol 55, p 55 and Tetrahedron Lett. 1992, vol 33, p 5173). This triol is currently used to provide access to a variety of such C-9 analogues.

[0259] In chapter 20 of Taxane Anticancer Agents, Basic Science and Current Status, (edited by G. George et al., ACS Symposium Series 583, 207^{th} National Meeting of the American Chemical Society, San Diego, Calif. (1994)) Klein describes a number of C-7/C-9 taxane analogs. One of routes discussed by Klein begins with the selective deacylation of 13-acetyl-9-dihydrobaccatin III, followed by the selective protection of the C7 alcohol as the silyl ether. A standard lactam coupling introduced the C-13 sidechain. The alcohols at C-7 and C-9 were sufficiently differentiated to allow a wide range of analogs to be generated. “In contrast to the sensitivity of the C-9 carbonyl series under basic conditions, the 9(R)-dihydro system can be treated directly with strong base in order to alkylate the C-7 and/or the C-9 hydroxyl groups.”

[chemical structure]

[0260] One skilled in the art may adapt Klein's general procedures to install a variety of magnetic carriers at these positions. Such minor adaptations are routine for those skilled in the art.

Attachment at C-7 and C-9

[0261] Klein also describes a procedure wherein 13-acetyl-9-dihydrobaccatin III is converted to 9-dihydrotaxol. Reference may be had to “Synthesis of 9-Dihydrotaxol: a Novel Bioactive Taxane” by L. L. Klein in Tetrahedron Lett. Vol 34, pp 2047-2050. An intermediate in this synthetic pathway is the dimethylketal of 9-dihydrotaxol.

[chemical structure]

[0262] In one embodiment, the procedure of Klein is followed with a carbonyl compound other than acetone to bind a wide variety of groups to the subject ketal. Supplemental discussion of C-9 analogs is found in “Synthesis of 9-Deoxotaxane Analogs” by L. L. Klein in Tetrahedron Lett. Vol 35, p 4707 (1994).

Attachment at C-10

[0263] In one embodiment of the invention, the C-10 position is functionalized using the procedure disclosed in U.S. Pat. No. 6,638,973. This patent teaches the synthesis of paclitaxel analogs that vary at the C-10 position. A sample of 10-deacetylbaccatin III was acylated by treatment with propionic anhydride. The C-13 sidechain was attached using standard lactam methodology after first performing a selective protection of the secondary alcohol at the C-7 position. In one embodiment of the invention, this procedure is adapted to allow access to a variety of C-10 analogues of paclitaxel.

[chemical structure]

[0264] In one embodiment an anhydride is used as an electrophile. In another embodiment, an acid halide is used. As would be apparent to one of ordinary skill in the art, a variety of electrophiles could be employed. [chemical structure]
Siderophores

[0265] In one embodiment, a member of the taxane family of compounds is attached to a magnetic carrier particle. Suitable carrier particles include siderophores (both iron and non-iron containing), nitroxides, as well as other magnetic carriers.

[0266] Siderophores are a class of compounds that act as chelating agents for various metals. Most organisms use siderophores to chelate iron (III) although other metals may be exchanged for iron (see, for example, Exchange of Iron by Gallium in Siderophores by Emergy, Biochemistry 1986, vol 25, pages 4629-4633). Most of the siderophores known to date are either catecholates or hydroxamic acids.

[chemical structure]

[0267] Representative examples of catecholate siderophores include the albomycins, agrobactin, parabactin, enterobactin, and the like.

[chemical structure]

[0268] Examples of hydroxamic acid-based siderophores include ferrichrome, ferricrocin, the albomycins, ferrioxamines, rhodotorulic acid, and the like. Reference may be had to Microbial Iron Chelators as Drug Delivery Agents by M. J. Miller et al., Acc. Chem. Res. 1993, vol 26, pp 241-249; Structure of Des(diserylglycyl)ferrirhodin, DDF, a Novel Siderophore from Aspergillus ochraceous by M. A. F. Jalal et al., J. Org. Chem. 1985, vol 50, pp 5642-5645; Synthesis and Solution Structure of Microbial Siderophores by R. J. Bergeron, Chem. Rev. 1984, vol 84, pp 587-602; and Coordination Chemistry and Microbial Iron Transport by K. N. Raymond, Acc. Chem. Res., 1979, vol 12, pp 183-190. The synthesis of a retrohydroxamate analog of ferrichrome is described by R. K. Olsen et al. in J. Org. Chem. 1985, vol 50, pp 2264-2271.

[chemical structure]

[0269] In “Total Synthesis of Desferrisalmycin” (M. J. Miller et al. in J. Am. Chem. Soc. 2002, vol 124 pp 15001-15005), a natural product is synthesized that contains a siderophore. The author states “siderophores are functionally defined as low molecular mass molecules which acquire iron (III) from the environment and transport it into microganisms. Because of the significant roles they play in the active transport of physiologically essentially iron (III) through microbe cell members, it is not surprising that siderophores-drug conjugates are attracting more and more attention from both medicinal chemists and clinical researchers as novel drug delivery systems in the war against microbial infections, especially in an area of widespread emergency of multidrug-resistance (MDR) strains. There have been three families of compounds identified as natural siderophore-drug conjugates, including ferrimycin, albomycin, and salmycin.” In a related paper, Miller describes the use of siderophores as drug delivery agents (Acc. Chem. Res. 1993, vol 26, pp 241-249. Presumably, the siderophore acts as a “sequestering agents [to] facilitate the active transport of chelated iron into cells where, by modification, reduction, or siderophore decomposition, it is released for use by the cell.” Miller describes the process of tethering a drug to a sidrophore to promote the active transport of the drug across the cell membrane.

[0270] In “The Preparation of a Fully Differentiated ‘Multiwarhead’ Sidrophore Precursor”, by M. J. Miller et al (J. Org. Chem. 2003, vol 68, pp 191-194) a precursor is disclosed which allows for a drug to be tethered to a sidrophore. In one embodiment, the route disclosed by Miller is employed to provide a variety of siderophores of similar structure. The synthesis of similar hydroxamic acid-based siderophores is discussed in J. Org. Chem. 2000, vol 65 (Total Synthesis of the Siderophore Danoxamine by M. J. Miller et al.), pp 4833-4838 and in the J. of Med. Chem. 1991, vol 32, pp 968-978 (by M. J. Miller et al.).

[0271] A variety of fluorescent labels have been attached to ferrichrome analogues in “Modular Fluorescent-Labeled Siderophore Analogues” by A. Shanzer et al. in J. Med. Chem. 1998, vol 41, 1671-1678. The authors have developed a general methodology for such attachments.

[chemical structure]

[0272] As discussed above, functionalized ferrichrome analogs have been previous generated, usually using basic amine acids (glycine). In one embodiment, functionality is introduced using an alternative amine acid (such as serine) in place of the central glycine residue. This provides a functional group foothold from which to base a wide variety of analogs. Using traditional synthetic techniques, various linkers are utilized so as to increase or decrease the distance between the magnetic carrier and the drug.

[chemical structure]

[0273] As would be apparent to one of ordinary skill in the art, the above specified techniques are widely applicable to a variety of substrates. By way of illustration, and not limitation, a number of magnetic taxanes are shown below. [chemical structure] [chemical structure]
Nitroxides

[0274] Another class of magnetic carriers is the nitroxyl radicals (also known as nitroxides). Nitroxyl radicals a “persistent” radials that are unusually stable. A wide variety of nitroxyls are commercially available. Their paramagnetic nature allows them to be used as spin labels and spin probes.

[chemical structure]

[0275] In addition to the commercially available nitroxyls, other paramagnetic radical labels have been generated by acid catalyzed condensation with 2-Amino-2-methyl-1-propanol followed by oxidation of the amine.

[chemical structure]

[chemical structure]

[0276] One of ordinary skill in the art could use the teachings of this specification to generate a wide variety of suitable carrier-drug complexes. The following table represents but a small sampling of such compounds.

[chemical structure]

[chemical structure]

[chemical structure]

[chemical structure]

[chemical structure]

[chemical structure]

[chemical structure]

| R1 | R2 | R3 | R4 |
|---|---|---|---|
| F1, Y = CH2, | H | Ac | COPh |
| n = 0 to 20 | | | |
| Ac | F1, Y = CH2, | Ac | COPh |
| | n = 0 to 20 | | |
| Ac | H | F1, Y = CH2, | COPh |
| | | n = 0 to 20 | |
| Ac | H | Ac | F1, Y = CH2, |
| | | | n = 0 to 20 |
| H | H | Ac | Boc |
| F1, Y = CH2, | H | Ac | Boc |
| n = 0 to 20 | | | |
| H | F1, Y = CH2, | Ac | Boc |
| | n = 0 to 20 | | |
| H | H | F1, Y = CH2, | Boc |
| | | n = 0 to 20 | |
| H | H | Ac | F1, Y = CH2, |
| | | | n = 0 to 20 |
| F1, Y = NH or | H | Ac | COPh |
| NR, n = 0 to | | | |
| 20 | | | |
| Ac | F1, Y = NH or | Ac | COPh |
| | NR, n = 0 to | | |
| | 20 | | |
| Ac | H | F1, Y = NH or | COPh |
| | | NR, n = 0 to | |
| | | 20 | |
| Ac | H | Ac | F1, Y = NH or |
| | | | NR, n = 0 to |
| | | | 20 |
| H | H | Ac | Boc |
| F1, Y = NH or | H | Ac | Boc |
| NR, n = 0 to | | | |
| 20 | | | |
| H | F1, Y = NH or | Ac | Boc |
| | NR, n = 0 to | | |
| | 20 | | |
| H | H | F1, Y = NH or | Boc |
| | | NR, n = 0 to | |
| | | 20 | |
| H | H | Ac | F1, Y = NH or |
| | | | NR, n = 0 to |
| | | | 20 |
| N1, n = 0 to 20 | H | Ac | COPh |
| Ac | N1, n = 0 to 20 | Ac | COPh |
| Ac | H | N1, n = 0 to 20 | COPh |
| Ac | H | Ac | N1, n = 0 to 20 |
| H | H | Ac | Boc |
| N1, n = 0 to 20 | H | Ac | Boc |
| H | N1, n = 0 to 20 | Ac | Boc |
| H | H | N1, n = 0 to 20 | Boc |
| H | H | Ac | N1, n = 0 to 20 |
| N2, n = 0 to | H | Ac | COPh |
| 20, X = O or | | | |
| NH | | | |
| Ac | N2, n = 0 to | Ac | COPh |
| | 20, X = O or | | |
| | NH | | |
| Ac | H | N2, n = 0 to | COPh |
| | | 20, X = O or | |
| | | NH | |
| Ac | H | Ac | N2, n = 0 to |
| | | | 20, X = O or |
| | | | NH |
| H | H | Ac | Boc |
| N2, n = 0 to | H | Ac | Boc |
| 20, X = O or | | | |
| NH | | | |
| H | N2, n = 0 to | Ac | Boc |
| | 20, X = O or | | |
| | NH | | |
| H | H | N2, n = 0 to | Boc |
| | | 20, X = O or | |
| | | NH | |
| H | H | Ac | N2, n = 0 to |
| | | | 20, X = O or |
| | | | NH |
| N3, n = 0 to | H | Ac | COPh |
| 20, X = O or | | | |
| NH | | | |
| Ac | N3, n = 0 to | Ac | COPh |
| | 20, X = O or | | |
| | NH | | |
| Ac | H | N3, n = 0 to | COPh |
| | | 20, X = O or | |
| | | NH | |
| Ac | H | Ac | N3, n = 0 to |
| | | | 20, X = O or |
| | | | NH |
| H | H | Ac | Boc |
| N3, n = 0 to | H | Ac | Boc |
| 20, X = O or | | | |
| NH | | | |
| H | N3, n = 0 to | Ac | Boc |
| | 20, X = O or | | |
| | NH | | |
| H | H | N3, n = 0 to | Boc |
| | | 20, X = O or | |
| | | NH | |
| H | H | Ac | N3, n = 0 to |
| | | | 20, X = O or |
| | | | NH |
| F2 or F3 | H | Ac | COPh |
| Ac | F2 or F3 | Ac | COPh |
| Ac | H | F2 or F3 | COPh |
| Ac | H | Ac | F2 or F3 |
| F2 or F3 | H | Ac | Boc |
| H | F2 or F3 | Ac | Boc |
| H | H | F2 or F3 | Boc |
| H | H | Ac | F2 or F3 |

[0277] The prior disclosure illustrates how one may modify prior art taxanes to make them magnetic. As will be apparent to those skilled in the art, one may similarly modify other modifiable prior art anti-mitotic compounds to make them magnetic.

Other Modifiable Prior Art Compounds

[0278] Many anti-mitotic compounds that may be modified in accordance with the process of this invention are described in the prior art. One of these compounds is discodermolide; and it is described in U.S. Pat. No. 6,541,509, the entire disclosure of which is hereby incorporated by reference into this specification. Reference may be had, e.g., to column 10 of such patent and to the references 10, 11, 12, and 13 cited in such patent.

[0279] The reference 12 in U.S. Pat. No. 6,541,509 is to an article by R. J. Kowalski et al., “The Microtubule-Stabilizing Agent Discodermolide Competitively Inhibits the Binding of Paclitaxel(Taxol) to Tubulin Monomers, . . . ” Mol. Pharacol. 52:613-22, 1997. At page 2 of the Kowalski et al. patent, a formula for discodermolide is presented with 29 numbered carbon atoms (see FIG. 1).

[0280] Elsewhere in this specification, applicants teach how to make “magnetic taxanes” by incorporating therein various linker groups and/or siderophores. The same linker groups and/or siderphores may be utilized via substantially the same process to make the discodermolide magnetic in the same manner.

[0281] As is disclosed elsewhere in this specification, siderphores are a class of compounds that act as chelating agents for various metals. When used to make “magnetic taxanes,” they are preferably bound to either the C7 and/or the C10 carbons of the paclitaxels. They can similarly be used to make “magnetic discodermolides,” but in this latter case they should be bonded at the C17 carbon of discodermolide, to which a hydroxyl group is bound. The same linker that is used to link the C7/C10 carbon of the taxane to the siderphore may also be sued to link the C17 carbon of the discodermolde to the siderphore.

[0282] In one embodiment, the “siderohophoric group” disclosed in U.S. Pat. No. 6,310,058, the entire disclosure of which is hereby incorporated by reference into this specification, is utilized. The siderophoric group is of the formula —(CH₂)ₘ—N(OH)—C(O)—(CH₂)n-(CH═CH)ₒ—CH3, wherein m is an integer of from 2 to 6, n is 0 or an integer of from 1 to 22, and o is 0 or an integer 1 to 4, provided that m+o is no greater than 25.

[0283] In another embodiment, “magnetic epothilone A” and/or “magnetic epotilone B” is also made by a similar process. As is also disclosed in the FIG. 1 of the Kowalski et al. article (see page 614), and in the formula depicted, the epothilone A exists when, in such formula, the alkyl group (“R”) is hydrogen, whereas the epothilone B exists when, in such formula, the alkyl group is methyl. In either case, one can make magnetic analogs of these compounds by using the same siderophores and the same linkers groups but utilizing them at a different site. One may bind such siderophores at either the number 3 carbon (which a hydroxyl group is bound) and/or the number 7 carbon (to which another hydroxyl group is bound.).

[0284] Without wishing to be bound to any particular theory, applicants believe that the binding of the siderphores at the specified carbon sites imparts the required magnetic properties to such modified materials without adversely affecting the anti-mitotic properties of the material. In fact, in some embodiment, the anti-mitotic properties of the modified magnetic materials surpass the anti-mitotic properties of the unmodified materials.

[0285] This is unexpected; for, if the same linker groups and/or siderophores are used to bind to other than the specified carbon atoms, materials with no or substantially poorer anti-mitotic properties are produced.

[0286] Thus, e.g., and referring to the magnetic taxanes described elsewhere in this specification (and also to FIG. 1 of the Kowalski et al. article), one should not link such siderphores to any carbons on the pendant aromatic rings. Thus, e.g., and referring to the discodermolide structure, one should not link siderphores to any of 1, 2, 3, or 4 carbon atoms. Thus, e.g., and referring to the epothilones, one should not link the siderphores to any carbon the ring structure containing sulfur and nitrogen.

[0287] By way of further illustration, and referring to U.S. Pat. Nos. 5,504,074, 5,661,143, 5,892,069, 6,528,676, and 6,723,858 (the entire disclosure of each of which is hereby incorporated by reference into this specification), one may modify estradiol and estradiol metabolites to make them magnetic in accordance with the process of this invention. As is disclosed in U.S. Pat. No. 6,723,858 (the entire disclosure of which is hereby incorporated by reference into this specification, “Cell mitosis is a multi-step process that includes cell division and replication (Alberts, B. et al. In The Cell, pp. 652-661 (1989); Stryer, E. Biochemistry (1988)). Mitosis is characterized by the intracellular movement and segregation of organelles, including mitotic spindles and chromosomes. Organelle movement and segregation are facilitated by the polymerization of the cell protein tubulin. Microtubules are formed from alpha. and β tubulin polymerization and the hydrolysis of guanosine triphosphate (GTP). Microtubule formation is important for cell mitosis, cell locomotion, and the movement of highly specialized cell structures such as cilia and flagella.”

[0288] As is also disclosed in U.S. Pat. No. 6,723,858, “Microtubules are extremely labile structures that are sensitive to a variety of chemically unrelated anti-mitotic drugs. For example, colchicine and nocadazole are anti-mitotic drugs that bind tubulin and inhibit tubulin polymerization (Stryer, E. Biochemistry (1988)). When used Cell mitosis is a multi-step process that includes cell division and replication (Alberts, B. et al. In The Cell, pp. 652-661 (1989); Stryer, E. Biochemistry (1988)). Mitosis is characterized by the intracellular movement and segregation of organelles, including mitotic spindles and chromosomes. Organelle movement and segregation are facilitated by the polymerization of the cell protein tubulin. Microtubules are formed from alpha. and β tubulin polymerization and the hydrolysis of guanosine triphosphate (GTP). Microtubule formation is important for cell mitosis, cell locomotion, and the movement of highly specialized cell structures such as cilia and flagella. Microtubules are extremely labile structures that are sensitive to a variety of chemically unrelated anti-mitotic drugs. For example, colchicine and nocadazole are anti-mitotic drugs that bind tubulin and inhibit tubulin polymerization (Stryer, E. Biochemistry (1988)). When used alone or in combination with other therapeutic drugs, colchicine may be used to treat cancer (WO-9303729-A, published Mar. 4, 1993; J 03240726-A, published Oct. 28, 1991), alter neuromuscular function, change blood pressure, increase sensitivity to compounds affecting sympathetic neuron function, depress respiration, and relieve gout (Physician's Desk Reference, Vol. 47, p. 1487, (1993)).”

[0289] As is also disclosed in U.S. Pat. No. 6,723,858, “Estradiol and estradiol metabolites such as 2-methoxyestradiol have been reported to inhibit cell division (Seegers, J. C. et al. J. Steroid Biochem. 32, 797-809 (1989); Lottering, M-L. et al. Cancer Res. 52, 5926-5923(1992); Spicer, L. J. and Hammond, J. M. Mol. and Cell. Endo. 64, 119-126 (1989); Rao, P. N. and Engelberg, J. Exp. Cell Res. 48, 71-81 (1967)). However, the activity is variable and depends on a number of in vitro conditions. For example, estradiol inhibits cell division and tubulin polymerization in some in vitro settings (Spicer, L. J. and Hammond, J. M. Mol. and Cell. Endo. 64, 119-126 (1989); Ravindra, R., J. Indian Sci. 64 (c) (1983)), but not in others (Lottering, M-L. et al. Cancer Res. 52, 5926-5923 (1992); Ravindra, R., J. Indian Sci. 64 (c) (1983)). Estradiol metabolites such as 2-methoxyestradiol will inhibit cell division in selected in vitro settings depending on whether the cell culture additive phenol red is present and to what extent cells have been exposed to estrogen. (Seegers, J. C. et al. Joint NCI-IST Symposium. Biology and Therapy of Breast Cancer. Sep. 25, Sep. 27, 1989, Genoa, Italy, Abstract A 58). alone or in combination with other therapeutic drugs, colchicine may be used to treat cancer (WO-09303729-A, published Mar. 4, 1993; J 03240726-A, published Oct. 28, 1991), alter neuromuscular function, change blood pressure, increase sensitivity to compounds affecting sympathetic neuron function, depress respiration, and relieve gout (Physician's Desk Reference, Vol. 47, p. 1487, (1993)).

[0290] As is also disclosed in U.S. Pat. No. 6,723,858, estradiol and estradiol metabolites such as 2-methoxyestradiol have been reported to inhibit cell division (Seegers, J. C. et al. J. Steroid Biochem. 32, 797-809 (1989); Lottering, M-L. et al. Cancer Res. 52, 5926-5923(1992); Spicer, L. J. and Hammond, J. M. Mol. and Cell. Endo. 64, 119-126 (1989); Rao, P. N. and Engelberg, J. Exp. Cell Res. 48, 71-81 (1967)). However, the activity is variable and depends on a number of in vitro conditions. For example, estradiol inhibits cell division and tubulin polymerization in some in vitro settings (Spicer, L. J. and Hammond, J. M. Mol. and Cell. Endo. 64, 119-126 (1989); Ravindra, R., J. Indian Sci. 64 (c) (1983)), but not in others (Lottering, M-L. et al. Cancer Res. 52, 5926-5923 (1992); Ravindra, R., J. Indian Sci. 64 (c) (1983)). Estradiol metabolites such as 2-methoxyestradiol will inhibit cell division in selected in vitro settings depending on whether the cell culture additive phenol red is present and to what extent cells have been exposed to estrogen. (Seegers, J. C. et al. Joint NCI-IST Symposium. Biology and Therapy of Breast Cancer. Sep. 25, Sep. 27, 1989, Genoa, Italy, Abstract A 58).

[0291] In one preferred embodiment, the modifiable anti-mitotic agent is an anti-microtubule agent. In one aspect of this embodiment, and referring to U.S. Pat. No. 6,689,803 at columns 5-6 thereof (the entire disclosure of which patent is hereby incorporated by reference into this specification), representative anti-microtubule agents include, e.g., “ . . . taxanes (e.g., paclitaxel and docetaxel), campothecin, eleutherobin, sarcodictyins, epothilones A and B, discodermolide, deuterium oxide (D₂O), hexylene glycol (2-methyl-2,4-pentanediol), tubercidin (7-deazaadenosine), LY290181 (2-amino-4-(3-pyridyl)-4H-naphtho(1,2-b)pyran-3-cardonitrile), aluminum fluoride, ethylene glycol bis-(succinimidylsuccinate), glycine ethyl ester, nocodazole, cytochalasin B, colchicine, colcemid, podophyllotoxin, benomyl, oryzalin, majusculamide C, demecolcine, methyl-2-benzimidazolecarbamate (MBC), LY195448, subtilisin, 1069C85, steganacin, combretastatin, curacin, estradiol, 2-methoxyestradiol, flavanol, rotenone, griseofulvin, vinca alkaloids, including vinblastine and vincristine, maytansinoids and ansamitocins, rhizoxin, phomopsin A, ustiloxins, dolastatin 10, dolastatin 15, halichondrins and halistatins, spongistatins, cryptophycins, rhazinilam, betaine, taurine, isethionate, HO-221, adociasulfate-2, estramustine, monoclonal anti-idiotypic antibodies, microtubule assembly promoting protein (taxol-like protein, TALP), cell swelling induced by hypotonic (190 mmol/L) conditions, insulin (100 nmol/L) or glutamine (10 mmol/L), dynein binding, gibberelin, XCHO1 (kinesin-like protein), lysophosphatidic acid, lithium ion, plant cell wall components (e.g., poly-L-lysine and extensin), glycerol buffers, Triton X-100 microtubule stabilizing buffer, microtubule associated proteins (e.g., MAP2, MAP4, tau, big tau, ensconsin, elongation factor-1-alpha (EF-1.alpha.) and E-MAP-115), cellular entities (e.g., histone H1, myelin basic protein and kinetochores), endogenous microtubular structures (e.g., axonemal structures, plugs and GTP caps), stable tubule only polypeptide (e.g., STOP145 and STOP220) and tension from mitotic forces, as well as any analogues and derivatives of any of the above. Within other embodiments, the anti-microtubule agent is formulated to further comprise a polymer.”

[0292] The term “anti-microtubule,” as used in this specification (and in the specification of U.S. Pat. No. 6,689,803), refers to any “ . . . protein, peptide, chemical, or other molecule which impairs the function of microtubules, for example, through the prevention or stabilization of polymerization. A wide variety of methods may be utilized to determine the anti-microtubule activity of a particular compound, including for example, assays described by Smith et al. (Cancer Lett 79(2):213-219, 1994) and Mooberry et al., (Cancer Lett. 96(2):261-266, 1995);” see, e.g., lines 13-21 of column 14 of U.S. Pat. No. 6,689,803. One preferred method, utilizing the anti-mitotic factor, is described in this specification.

[0293] An extensive listing of anti-microtubule agents is provided in columns 14, 15, 16, and 17 of U.S. Pat. No. 6,689,803; and one or more of them may be modified them in accordance with the process of this invention to make them magnetic. These anti-microtubule agents include “ . . . taxanes (e.g., paclitaxel (discussed in more detail below) and docetaxel) (Schiff et al., Nature 277: 665-667, 1979; Long and Fairchild, Cancer Research 54: 4355-4361, 1994; Ringel and Horwitz, J. Natl. Cancer Inst. 83(4): 288-291, 1991; Pazdur et al., Cancer Treat. Rev. 19(4): 351-386, 1993), campothecin, eleutherobin (e.g., U.S. Pat. No. 5,473,057), sarcodictyins (including sarcodictyin A), epothilones A and B (Bollag et al., Cancer Research 55: 2325-2333, 1995), discodermolide (ter Haar et al., Biochemistry 35: 243-250, 1996), deuterium oxide (D2O) (James and Lefebvre, Genetics 130(2): 305-314, 1992; Sollott et al., J. Clin. Invest. 95:1869-1876, 1995), hexylene glycol (2-methyl-2,4-pentanediol) (Oka et al., Cell Struct. Funct. 16(2): 125-134, 1991), tubercidin (7-deazaadenosine) (Mooberry et al., Cancer Lett. 96(2): 261-266, 1995), LY290181 (2-amino-4-(3-pyridyl)-4H-naphtho(1,2-b)pyran-3-cardonitrile) (Panda et al., J. Biol. Chem. 272(12): 7681-7687, 1997; Wood et al., Mol. Pharmacol. 52(3): 437-444, 1997), aluminum fluoride (Song et al., J. Cell. Sci. Suppl. 14: 147-150, 1991), ethylene glycol bis-(succinimidylsuccinate) (Caplow and Shanks, J. Biol. Chem. 265(15): 8935-8941, 1990), glycine ethyl ester (Mejillano et al., Biochemistry 31(13): 3478-3483, 1992), nocodazole (Ding et al., J. Exp. Med. 171(3): 715-727, 1990; Dotti et al., J. Cell Sci. Suppl. 15: 75-84, 1991; Oka et al., Cell Struct. Funct. 16(2): 125-134, 1991; Weimer et al., J. Cell. Biol. 136(1), 71-80, 1997), cytochalasin B (Illinger et al., Biol. Cell 73(2-3): 131-138, 1991), colchicine and CI 980 (Allen et al., Am. J. Physiol. 261(4 Pt. 1): L315-L321, 1991; Ding et al., J. Exp. Med. 171(3): 715-727, 1990; Gonzalez et al., Exp. Cell. Res. 192(1): 10-15, 1991; Stargell et al., Mol. Cell. Biol. 12(4): 1443-1450, 1992; Garcia et al., Antican. Drugs 6(4): 533-544, 1995), colcemid (Barlow et al., Cell. Motil. Cytoskeleton 19(1): 9-17, 1991; Meschini et al., J. Microsc. 176(Pt. 3): 204-210, 1994; Oka et al., Cell Struct. Funct. 16(2): 125-134, 1991), podophyllotoxin (Ding et al., J. Exp. Med. 171(3): 715-727, 1990), benomyl (Hardwick et al., J. Cell. Biol. 131(3): 709-720, 1995; Shero et al., Genes Dev. 5(4): 549-560, 1991), oryzalin (Stargell et al., Mol. Cell. Biol. 12(4): 1443-1450, 1992), majusculamide C (Moore, J. Ind. Microbiol. 16(2): 134-143, 1996), demecolcine (Van Dolah and Ramsdell, J. Cell. Physiol. 166(1): 49-56, 1996; Wiemer et al., J. Cell. Biol. 136(1): 71-80, 1997), methyl-2-benzimidazolecarbamate (MBC) (Brown et al., J. Cell. Biol. 123(2): 387-403, 1993), LY195448 (Barlow & Cabral, Cell Motil. Cytoskel. 19: 9-17, 1991), subtilisin (Saoudi et al., J. Cell Sci. 108: 357-367, 1995), 1069C85 (Raynaud et al., Cancer Chemother. Pharmacol. 35: 169-173, 1994), steganacin (Hamel, Med. Res. Rev. 16(2): 207-231, 1996), combretastatins (Hamel, Med. Res. Rev. 16(2): 207-231, 1996), curacins (Hamel, Med. Res. Rev. 16(2): 207-231, 1996), estradiol (Aizu-Yokata et al., Carcinogen. 15(9): 1875-1879, 1994), 2-methoxyestradiol (Hamel, Med. Res. Rev. 16(2): 207-231, 1996), flavanols (Hamel, Med. Res. Rev. 16(2): 207-231, 1996), rotenone (Hamel, Med. Res. Rev. 16(2): 207-231, 1996), griseofulvin (Hamel, Med. Res. Rev. 16(2): 207-231; 1996), vinca alkaloids, including vinblastine and vincristine (Ding et al., J. Exp. Med. 171(3): 715-727, 1990; Dirk et al., Neurochem. Res. 15(11): 1135-1139, 1990; Hamel, Med. Res. Rev. 16(2): 207-231, 1996; Illinger et al., Biol. Cell 73(2-3): 131-138, 1991; Wiemer et al., J. Cell. Biol. 136(1): 71-80, 1997), maytansinoids and ansamitocins (Hamel, Med. Res. Rev. 16(2): 207-231, 1996), rhizoxin (Hamel, Med. Res. Rev. 16(2): 207-231, 1996), phomopsin A (Hamel, Med. Res. Rev. 16(2): 207-231, 1996), ustiloxins (Hamel, Med. Res. Rev. 16(2): 207-231, 1996), dolastatin 10 (Hamel, Med Res. Rev. 16(2): 207-231, 1996), dolastatin 15 (Hamel, Med. Res. Rev. 16(2): 207-231, 1996), halichondrins and halistatins (Hamel, Med. Res. Rev. 16(2): 207-231, 1996), spongistatins (Hamel, Med. Res. Rev. 16(2): 207-231, 1996), cryptophycins (Hamel, Med. Res. Rev. 16(2): 207-231, 1996), rhazinilam (Hamel, Med. Res. Rev. 16(2): 207-231, 1996), betaine (Hashimoto et al., Zool. Sci. 1: 195-204, 1984), taurine (Hashimoto et al., Zool. Sci. 1: 195-204, 1984), isethionate (Hashimoto et al., Zool. Sci. 1: 195-204, 1984), HO-221 (Ando et al., Cancer Chemother. Pharmacol. 37: 63-69, 1995), adociasulfate-2 (Sakowicz et al., Science 280: 292-295, 1998), estramustine (Panda et al., Proc. Natl. Acad. Sci. USA 94: 10560-10564, 1997), monoclonal anti-idiotypic antibodies (Leu et al., Proc. Natl. Acad. Sci. USA 91(22): 10690-10694, 1994), microtubule assembly promoting protein (taxol-like protein, TALP) (Hwang et al., Biochem. Biophys. Res. Commun. 208(3): 1174-1180, 1995), cell swelling induced by hypotonic (190 mosmol/L) conditions, insulin (100 nmol/L) or glutamine (10 mmol/L) (Haussinger et al., Biochem. Cell. Biol. 72(1-2): 12-19, 1994), dynein binding (Ohba et al., Biochim. Biophys. Acta 1158(3): 323-332, 1993), gibberelin (Mita and Shibaoka, Protoplasma 119(1/2): 100-109, 1984), XCHO1 kinesin-like protein) (Yonetani et al., Mol. Biol. Cell 7(suppl): 211A, 1996), lysophosphatidic acid (Cook et al., Mol. Biol. Cell 6(suppl): 260A, 1995), lithium ion (Bhattacharyya and Wolff, Biochem. Biophys. Res. Commun. 73(2): 383-390, 1976), plant cell wall components (e.g., poly-L-lysine and extensin) (Akashi et al., Planta 182(3): 363-369, 1990), glycerol buffers (Schilstra et al., Biochem. J. 277(Pt. 3): 839-847, 1991; Farrell and Keates, Biochem. Cell. Biol. 68(11): 1256-1261, 1990; Lopez et al., J. Cell. Biochem. 43(3): 281-291, 1990), Triton X-100 microtubule stabilizing buffer (Brown et al., J. Cell Sci. 104(Pt. 2): 339-352, 1993; Safiejko-Mroczka and Bell, J. Histochem. Cytochem. 44(6): 641-656, 1996), microtubule associated proteins (e.g., MAP2, MAP4, tau, big tau, ensconsin, elongation factor-1-alpha EF-1.alpha.) and E-MAP-115) (Burgess et al., Cell Motil. Cytoskeleton 20(4): 289-300, 1991; Saoudi et al., J. Cell. Sci. 108(Pt. 1): 357-367, 1995; Bulinski and Bossler, J. Cell. Sci. 107(Pt. 10): 2839-2849, 1994; Ookata et al., J. Cell Biol. 128(5): 849-862, 1995; Boyne et al., J. Comp. Neurol. 358(2): 279-293, 1995; Ferreira and Caceres, J. Neurosci. 11(2): 392400, 1991; Thurston et al., Chromosoma 105(1): 20-30, 1996; Wang et al., Brain Res. Mol. Brain Res. 38(2): 200-208, 1996; Moore and Cyr, Mol. Biol. Cell 7(suppl): 221-A, 1996; Masson and Kreis, J. Cell Biol. 123(2), 357-371, 1993), cellular entities (e.g. histone H1, myelin basic protein and kinetochores) (Saoudi et al., J. Cell. Sci. 108(Pt. 1): 357-367, 1995; Simerly et al., J. Cell Biol. 111(4): 1491-1504, 1990), endogenous microtubular structures (e.g., axonemal structures, plugs and GTP caps) (Dye et al., Cell Motil. Cytoskeleton 21(3): 171-186, 1992; Azhar and Murphy, Cell Motil. Cytoskeleton 15(3): 156-161, 1990; Walker et al., J. Cell Biol. 114(1): 73-81, 1991; Drechsel and Kirschner, Curr. Biol. 4(12): 1053-1061, 1994), stable tubule only polypeptide (e.g., STOP145 and STOP220) (Pirollet et al., Biochim. Biophys. Acta 1160(1): 113-119, 1992; Pirollet et al., Biochemistry 31(37): 8849-8855, 1992; Bosc et al., Proc. Natl. Acad. Sci. USA 93(5): 2125-2130, 1996; Margolis et al., EMBO J. 9(12): 4095-4102, 1990) and tension from mitotic forces (Nicklas and Ward, J. Cell Biol. 126(5): 1241-1253, 1994), as well as any analogues and derivatives of any of the above. Such compounds can act by either depolymerizing microtubules (e.g., colchicine and vinblastine), or by stabilizing microtubule formation (e.g., paclitaxel).”

[0294] U.S. Pat. No. 6,689,803 also discloses (at columns 16 and 17 that, “Within one preferred embodiment of the invention, the anti-mitotic compound is paclitaxel, a compound which disrupts microtubule formation by binding to tubulin to form abnormal mitotic spindles. Briefly, paclitaxel is a highly derivatized diterpenoid (Wani et al., J. Am. Chem. Soc. 93:2325, 1971) which has been obtained from the harvested and dried bark of Taxus brevifolia (Pacific Yew) and Taxomyces Andreanae and Endophytic Fungus of the Pacific Yew (Stierle et al., Science 60:214-216,-1993). “Paclitaxel” (which should be understood herein to include prodrugs, analogues and derivatives such as, for example, TAXOL®, TAXOTERE®, Docetaxel, 10-desacetyl analogues of paclitaxel and 3′N-desbenzoyl-3′N-t-butoxy carbonyl analogues of paclitaxel) may be readily prepared utilizing techniques known to those skilled in the art (see e.g., Schiff et al., Nature 277:665-667, 1979; Long and Fairchild, Cancer Research 54:4355-4361, 1994; Ringel and Horwitz, J. Natl Cancer Inst. 83(4):288-291, 1991; Pazdur et al., Cancer Treat. Rev. 19(4):351-386, 1993; WO9407882; WO9407881; WO9407880; WO9407876; WO9323555; WO9310076; WO94/00156; WO9324476; EP590267; WO9420089; U.S. Pat. Nos. 5,294,637; 5,283,253; 5,279,949; 5,274,137; 5,202,448; 5,200,534; 5,229,529; 5,254,580; 5,412,092; 5,395,850; 5,380,751; 5,350,866; 4,857,653; 5,272,171; 5,411,984; 5,248,796; 5,248,796; 5,422,364; 5,300,638; 5,294,637; 5,362,831; 5,440,056; 4,814,470; 5,278,324; 5,352,805; 5,411,984; 5,059,699; 4,942,184; Tetrahedron Letters 35(52):9709-9712, 1994; J. Med. Chem. 35:4230-4237, 1992; J. Med. Chem. 34:992-998, 1991; J. Natural Prod. 57(10):1404-1410, 1994; J. Natural Prod. 57(11):1580-1583, 1994; J. Am. Chem. Soc. 110:6558-6560, 1988), or obtained from a variety of commercial sources, including for example, Sigma Chemical Co., St. Louis, Mo. (T7402—from Taxus brevifolia).”

[0295] As is also disclosed in U.S. Pat. No. 6,689,893, “Representative examples of such paclitaxel derivatives or analogues include 7-deoxy-docetaxol, 7,8-cyclopropataxanes, N-substituted 2-azetidones, 6,7-epoxy paclitaxels, 6,7-modified paclitaxels, 10-desacetoxytaxol, 10-deacetyltaxol (from 10-deacetylbaccatin III), phosphonooxy and carbonate derivatives of taxol, taxol 2′,7-di(sodium 1,2-benzenedicarboxylate, 10-desacetoxy-11,12-dihydrotaxol-10,12(18)-diene derivatives, 10-desacetoxytaxol, Protaxol(2′- and/or 7-O-ester derivatives), (2′-and/or 7-O-carbonate derivatives), asymmetric synthesis of taxol side chain, fluoro taxols, 9-deoxotaxane, (13-acetyl-9-deoxobaccatine III, 9-deoxotaxol, 7-deoxy-9-deoxotaxol, 10-desacetoxy-7-deoxy-9-deoxotaxol, Derivatives containing hydrogen or acetyl group and a hydroxy and tert-butoxycarbonylamino, sulfonated 2′-acryloyltaxol and sulfonated 2′-O-acyl acid taxol derivatives, succinyltaxol, 2′-.gamma.-aminobutyryltaxol formate, 2′-acetyl taxol, 7-acetyl taxol, 7-glycine carbamate taxol, 2′-OH-7-PEG(5000)carbamate taxol, 2′-benzoyl and 2′,7-dibenzoyl taxol derivatives, other prodrugs (2′-acetyl taxol; 2′,7-diacetyltaxol; 2′succinyltaxol; 2′-(beta-alanyl)-taxol); 2′gamma-aminobutyryltaxol formate; ethylene glycol derivatives of 2′-succinyltaxol; 2′-glutaryltaxol; 2′-(N,N-dimethylglycyl)taxol; 2′-(2-(N,N-dimethylamino)propionyl)taxol; 2′orthocarboxybenzoyl taxol; 2′aliphatic carboxylic acid derivatives of taxol, Prodrugs {2′(N,N-diethylaminopropionyl)taxol, 2′(N,N-dimethylglycyl)taxol, 7(N,N-dimethylglycyl)taxol, 2′,7-di-(N,N-dimethylglycyl)taxol, 7(N,N-diethylaminopropionyl)taxol, 2′,7-di(N,N-diethylaminopropionyl)taxol, 2′-(L-glycyl)taxol, 7-(L-glycyl)taxol, 2′,7-di(L-glycyl)taxol, 2′-(L-alanyl)taxol, 7-(L-alanyl)taxol, 2′,7-di(L-alanyl)taxol, 2′-(L-leucyl)taxol, 7-(L-leucyl)taxol, 2′,7-di(L-leucyl)taxol, 2′-(L-isoleucyl)taxol, 7-(L-isoleucyl)taxol, 2′,7-di(L-isoleucyl)taxol, 2′-(L-valyl)taxol, 7-(L-valyl)taxol, 2′,7-di(L-valyl)taxol, 2′-(L-phenylalanyl)taxol, 7-(L-phenylalanyl)taxol, 2′,7-di(L-phenylalanyl)taxol, 2′-(L-prolyl)taxol, 7-(L-prolyl)taxol, 2′,7-di(L-prolyl)taxol, 2′-(L-lysyl)taxol, 7-(L-lysyl)taxol, 2′,7-di(L-lysyl)taxol, 2′-(L-glutamyl)taxol, 7-(L-glutamyl)taxol, 2′,7-di(L-glutamyl)taxol, 2′-(L-arginyl)taxol, 7-(L-arginyl)taxol, 2′,7-di(L-arginyl)taxol}, Taxol analogs with modified phenylisoserine side chains, taxotere, (N-debenzoyl-N-tert-(butoxycaronyl)-10-deacetyltaxol, and taxanes (e.g., baccatin III, cephalomannine, 10-deacetylbaccatin III, brevifoliol, yunantaxusin and taxusin).”

[0296] By way of yet further illustration, one may use one or more of the anti-mitotic agents disclosed in U.S. Pat. No. 6,673,937 (syntheses and methods of use of new antimitotic agents), U.S. Pat. No. 6,624,317 (taxoid conjugates as antimitotoic and antitumor agents), U.S. Pat. No. 6,593,334 (camptothecin-taxoid conjugates as antimitotic and antitumor agents), U.S. Pat. No. 6,593,321 (2-alkoxyestradiiol analogs with antiproliferative and antimitotic activity), U.S. Pat. No. 6,569,870 (fluorinated quinolones as antimitotic and antitumor agent), U.S. Pat. No. 6,528,489 (mycotoxin derivatives as antimitotic agents), U.S. Pat. No. 6,392,055 (synthesis and biological evaluation of analogs of the antimitotic marine natural product curacin A), U.S. Pat. No. 6,127,377 (vinka alkaloid antimitotic halogenated derivatives), U.S. Pat. No. 5,695,950 (method of screening for antimitotic compounds using the cdc25 tyrosine phosphatase), U.S. Pat. No. 5,620,985 (antimitotic binary alkaloid derivatives from catharanthus roseus), U.S. Pat. No. 5,294,538 (method of screening for antimitotic compounds using the CDC tyrosine phosphatase), and the like. The entire disclosure of each of these United States patents is hereby incorporated by reference into this specification.

[0297] As will be apparent, one or more of the aforementioned anti-mitotic and/or anti-microtubule agents may be modified to make them magnetic in accordance with this invention.

Synergistic Combinations of Magnetic Anti-Mitotic Agents

[0298] In one embodiment of this invention, discussed elsewhere in this specification, a synergistic combination of the magnetic anti-mititoic compound of this invention and paclitaxel is described. In the embodiment of the invention described in this section of the specification, a synergitic combination of two or more anti-mititoic compounds is described.

[0299] In one embodiment, the first anti-mitotic compound is preferably a magnetic taxane such as, e.g., magnetic paclitaxel and/or magnetic docetaxel. In this embodiment, the second anti-mitotic compound may be magnetic discdermolide, and/or magnetic epothilone A, and/or magnetic epothilone B, and/or mixtures thereof. Other suitable combinations of magnetic anti-mitotic agents will be apparent.

Properties of the Preferred Anti-Mitotic Compounds

[0300] In one preferred embodiment, the compound of this invention has a mitotic index factor of at least about 10 percent and, more preferably, at least about 20 percent. In one aspect of this embodiment, the mitotic index factor is at least about 30 percent. In another embodiment, the mitotic index factor is at least about 50 percent.

[0301] In another embodiment of the invention, the compound of this invention has a mitotic index factor of less than about 5 percent.

[0302] As is known to those skilled in the art, the mitotic index is a measure of the extent of mitosis. Reference may be had, e.g., to U.S. Pat. No. 5,262,409 (binary tumor therapy), U.S. Pat. No. 5,443,962 (methods of identifying inhibitors of cdc25 phosphatase), U.S. Pat. No. 5,744,300 (methods and reagents for the identification and regulation of senescence-related genes), U.S. Pat. Nos. 6,613,318, 6,251,585 (assay and reagents for identifying anti-proliferative agents), 6,252,058 (sequences for targeting metastatic cells), 6,387,642 (method for identifying a reagent that modulates Myt1 activity), U.S. Pat. No. 6,413,735 (method of screening for a modulator of angiogenesis), U.S. Pat. No. 6,531,479 (anti-cancer compounds), U.S. Pat. No. 6,599,694 (method of characterizing potential therapeutics by determining cell-cell interactions), U.S. Pat. No. 6,620,403 (in vivo chemosensitivity screen for human tumors), U.S. Pat. No. 6,699,854 (anti-cancer compounds), U.S. Pat. No. 6,743,576 (database system for predictive cellular bioinformatics), and the like. The entire disclosure of each of these United States patents is hereby incorporated by reference into this specification.

[0303] Reference may also be had, e.g., to U.S. Pat. No. 5,262,409, which discloses that: “Determination of mitotic index: For testing mitotic blockage with nocodazole and taxol, cells were grown a minimum of 16 hours on polylysinecoated glass coverslips before drug treatment. Cells were fixed at intervals, stained with antibodies to detect lamin B, and counterstained with propidium iodide to assay chromosome condensation. To test cell cycle blocks in interphase, cells were synchronized in mitosis by addition of nocodazole (Sigma Chemical Co.) to a final concentration of 0.05 μg/ml from a 1 mg/ml stock in dimethylsulfoxide. After 12 hours arrest, the mitotic subpopulation was isolated by shakeoff from the culture plate. After applying cell cycle blocking drugs and/or 2-AP, cells were fixed at intervals, prepared for indirect immunofluorescence with anti-tubulin antibodies, and counterstained with propidium iodide. All data timepoints represent averages of three counts of greater than 150 cells each. Standard deviation was never more than 1.5% on the ordinate scale.”

[0304] Reference may be had, e.g., to U.S. Pat. No. 6,413,735 which discloses that: “The mitotic index is determined according to procedures standard in the art. Keram et al., Cancer Genet. Cytogenet. 55:235 (1991). Harvested cells are fixed in methanol:acetic acid (3:1, v:v), counted, and resuspended at 106 cells/ml in fixative. Ten microliters of this suspension is placed on a slide, dried, and treated with Giemsa stain. The cells in metaphase are counted under a light microscope, and the mitotic index is calculated by dividing the number of metaphase cells by the total number of cells on the slide. Statistical analysis of comparisons of mitotic indices is performed using the 2-sided paired t-test.”

[0305] By means of yet further illustration, one may measure the mitotic index by means of the procedures described in, e.g., articles by Keila Torres et al. (“Mechanisms of Taxol-Induced Cell Death are Concentration Dependent,” Cancer Research 58, 3620-3626, Aug. 15, 1998), and Jie-Gung Chen et al. (“Differential Mitosis Responses to Microtubule-stabilizing and destablilizng Drugs,” Cancer Research 62, 1935-1938, Apr. 1, 2002).

[0306] The mitotic index is preferably measured by using the well-known HeLa cell lines. As is known to those skilled in the art, HeLa cells are cells that have been derived from a human carcinoma of the cervix from a patient named Henrietta Lack; the cells have been maintained in tissued culture since 1953.

[0307] Hela cells are described, e.g., in U.S. Pat. No. 5,811,282 (cell lines useful for detection of human immunodeficiency virus), U.S. Pat. No. 5,376,525 (method for the detection of mycoplasma), U.S. Pat. Nos. 6,143,512, 6,326,196, 6,365,394 (cell lines and constructs useful in production of E-1 deleted adenoviruses), U.S. Pat. No. 6,440,658 (assay method for determining effect on aenovirus infection of Hela cells), U.S. Pat. No. 6,461,809 (method of improving inflectivity of cells for viruses), U.S. Pat. Nos. 6,596,535, 6,605,426, 6,610,493 (screening compounds for the ability to alter the production of amyloid-beta-peptide), U.S. Pat. No. 6,699,851 (cytotoxic compounds and their use), and the like; the entire disclosure of each of these United States patents is hereby incorporated by reference into this specification. By way of illustration, U.S. Pat. No. 6,440,658 discloses that, for the experiments described in such patent, “The HeLa cell line was obtained from the American Type Culture Collection, Manassas Va.”

[0308] In one preferred embodiment, the mitotic index of a “control cell line” (i.e., one that omits that drug to be tested) and of a cell line that includes 50 nanomoles of such drug per liter of the cell line are determined and compared. The “mitotic index factor” is equal to (Mt−Mc/Mc)×100, wherein Mc is the mitotic index of the “control cell line,” and Mt is the mitotic index of the cell line that includes the drug to be tested.

[0309] The compound of this invention preferably has a molecular weight of at least about 150 grams per mole. In one embodiment, the molecular weight of such compound is at least 300 grams per mole. In another embodiment, the molecular weight of such compound is 400 grams per mole. In yet another embodiment, the molecular weight of such compound is at least about 550 grams per mole. In yet another embodiment, the molecular weight of such compound is at least about 1,000 grams per mole. In yet another embodiment, the molecular weight of such compound is at least 1,200 grams per mole.

[0310] The compound of this invention preferably has a positive magnetic susceptibility of at least 1,000×10⁻⁶ centimeter-gram-seconds (cgs). As is known to those skilled in the art, magnetic susceptibility is the ratio of the magnetization of a material to the magnetic filed strength. Reference may be had, e.g., to U.S. Pat. No. 3,614,618 (magnetic susceptibility tester), U.S. Pat. No. 3,644,823 (nulling coil apparatus for magnetic susceptibility logging), U.S. Pat. No. 3,657,636 (thermally stable coil assembly for magnetic susceptibility logging), U.S. Pat. No. 3,665,297 (apparatus for determining magnetic susceptibility in a controlled chemical and thermal environment), U.S. Pat. No. 3,758,847 (method and system with voltage cancellation for measuring the magnetic susceptibility of a subsurface earth formation), U.S. Pat. No. 3,758,848 (magnetic susceptibility well logging system), U.S. Pat. No. 3,879,658 (apparatus for measuring magnetic susceptibility), U.S. Pat. No. 3,890,563 (magnetic susceptibility logging apparatus for distinguishing ferromagnetic materials), U.S. Pat. No. 3,980,076 (method for measuring externally of the human body magnetic susceptibility changes), U.S. Pat. No. 4,079,730 (apparatus for measuring externally of the human body magnetic susceptibility changes), U.S. Pat. No. 4,277,750 (induction probe for the measurement of magnetic susceptibility), U.S. Pat. No. 4,359,399 (taggands with induced magnetic susceptibility), U.S. Pat. No. 4,507,613 (method for identifying non-magnetic minerals in earth formations utilizing magnetic susceptibility measurements), U.S. Pat. No. 4,662,359 (use of magnetic susceptibility probes in the treatment of cancer), U.S. Pat. No. 4,701,712 (thermoregulated magnetic susceptibility sensor assembly), U.S. Pat. No. 5,233,992 (MRI method for high liver iron measurement using magnetic susceptibility induced field distortions), U.S. Pat. No. 6,208,884 (noninvasive room temperature instrument to measure magnetic susceptibility variations in body tissue), U.S. Pat. No. 6,321,105 (contrast agents with high magnetic susceptibility), U.S. Pat. No. 6,477,398 (resonant magnetic susceptibility imaging), and the like. The entire disclosure of each of these United States patent applications is hereby incorporated by reference into this specification.

[0311] In one embodiment, the compound of this invention has a positive magnetic susceptibility of at least 5,000×10⁻⁶ cgs. In another embodiment, such compound has a positive magnetic susceptibility of at least 10,000×10⁻⁶ cgs.

[0312] The compound of this invention is preferably comprised of at least 7 carbon atoms and, more preferably, at least about 10 carbon atoms. In another embodiment, such compound is comprised of at least 13 carbon atoms and at least one aromatic ring; in one aspect of this embodiment, the compound has at least two aromatic rings. In another embodiment, such compound is comprised of at least 17 carbon atoms.

[0313] In one embodiment, the compound of this invention is comprised of at least one oxetane ring. As is disclosed, e.g., on page 863 of N. Iving Sax's “Hawley's Condensed Chemical Dictionary,” Eleventh Edition (Van Nostrand Reinhold Company, New York, N.Y., 1987), the oxetane group, also known as “trimethylene oxide), is identified by chemical abstract number CAS: 503-30-0. The oxetane group present in the preferred compound preferably is unsubstituted. In one embodiment, however, one or more of the ring carbon atoms (either carbon number one, or carbon number two, or carbon number 3), has one or more of its hydrogen atoms substituted by a halogen group (such as chlorine), a lower alkyl group of from 1 to 4 carbon atoms, a lower haloalkyl group of from 1 to 4 carbon atoms, a cyanide group (CN), a hydroxyl group, a carboxyl group, an amino group (which can be primary, secondary, or teriarary and may also contain from 0 to 6 carbon atoms), a substituted hydroxyl group (such as, e.g., an ether group containing from 1 to 6 carbon atoms), and the like. In one aspect of this embodiment, the substituted oxetane group is 3,3-bis (chlormethyl) oxetane.

[0314] In one embodiment, the compound of this invention is comprised of from about 1 to 10 groups of the formula —OB, in which B is selected from the group consisting of hydrogen, alkyl of from about 1 to about 5 carbon atoms, and a moiety of the formula R—(C=0)—O—, wherein R is selected from the group consisting of hydrogen and alkyl of from about 1 to about 6 carbon atoms, and the carbon is bonded to the R moiety, to the double-bonded oxygen, and to the single bonded oxygen, thereby forming what is commonly known as an acetyl group. This acetyl group preferably is linked to a ring structure that is unsaturated and preferably contains from about 6 to about 10 carbon atoms.

[0315] In one embodiment, the compound is comprised of two unsaturated ring structures linked by an amide structure, which typically has an acyl group, —CONR₁ —, wherein R₁ is selected from the group consisting of hydrogen lower alkyl of from 1 to about 6 carbon atoms. In one preferred embodiment, the N group is bonded to both to the R₁ group and also to radical that contains at least about 20 carbon atoms and at least about 10 oxygen atoms.

[0316] In one embodiment, the compound of this invention contains at least one saturated ring comprising from about 6 to about 10 carbon atoms. By way of illustration, the saturated ring structures may be one or more cyclohexane rings, cyclopheptane rings, cyclooctane rings, cyclononane rings, and/or cyclodecane rings. In one preferred aspect of this embodiment, at least one saturated ring in the compound is bonded to at least one quinine group. Referring to page 990 of the “Hawley's Condensed Chemical Dictionary” described elsewhere in this specification, quinine is 1,4-benzoquinone and is identified as “CAS: 106-51-4.”

[0317] In one embodiment, the compound of this invention may comprise a ring structure with one double bond or two double bonds (as opposed to the three double bonds in the aromatic structures). These ring structures may be a partially unsaturated material selected from the group consisting of partially unsaturated cyclohexane, partially unsaturated cyclopheptane, partially unsaturated cyclooctane, partially unsaturated cyclononane, partially unsaturated cyclodecane, and mixtures thereof.

[0318] The compound of this invention is also preferably comprised of at least one inorganic atom with a positive magnetic susceptibility of at least 200×10⁻⁶ cgs. Thus, and referring to the “CRC Handbook of Chemistry and Physics,” 63^{rd} Edition (CRC Press, Inc., Boca Raton, Fla., 1982-83), the magnetic susceptibility of elements are described at pages E-118 to E-123. Suitable inorganic (i.e., non-carbon containing) elements with a positive magnetic susceptibility greater than about 200×10⁻⁶ cgs include, e.g., cerium (+5,160×10⁻⁶ cgs), cobalt (+11,000×10⁻⁶ cgs), dysprosium (+89,600×10⁻⁶ cgs), europium (+34,000×10⁻⁶ cgs), gadolinium (+755,000×10⁻⁶ cgs), iron (+13,600×10⁻⁶ cgs), manganese (+529×10⁻⁶ cgs), palladium (+567.4×10⁻⁶ cgs), plutonium (+610×10⁻⁶ cgs), praseodymium (+5010×10⁻⁶ cgs), samarium (+2230×10⁻⁶ cgs), technetium (+250×10⁻⁶ cgs), thulium (+51,444×10⁻⁶ cgs), and the like. In one embodiment, the positive magnetic susceptibility of such element is preferably greater than about +500×10⁻⁶ cgs and, even more preferably, greater than about +1,000×10⁻⁶ cgs.

[0319] In one preferred compound, the inorganic atom is radioactive. As is known to those skilled in the art, radioactivity is a phenomenon characterized by spontaneous disintegration of atomic nuclei with emission of corpuscular or electromagnetic radiation.

[0320] In another preferred embodiment, one or more inorganic or organic atoms that do not have the specified degree of magnetic susceptibility are radioactive. Thus, e.g., the radioactive atom may be, e.g, radioactive carbon, radioactive hydrogen (tritium), radioactive phosphorus, radioactive sulfur, radioactive potassium, or any other of the atoms that exist is radioactive isotope form.

[0321] One preferred class of atoms is the class of radioactive nuclides. As is known to those skilled in the art, radioactive nuclides are atoms disintegrate by emission of corpuscular or electromagnetic radiations. The rays most commonly emitted are alpha or beta gamma rays. See, e.g., page F-109 of the aforementioned “CRC Handbook of Chemistry and Physics.”

[0322] Radioactive nuclides are well known and are described, e.g., in U.S. Pat. No. 4,355,179 (radioactive nuclide labeled propiophenone compounds), U.S. Pat. No. 4,625,118 (device for the elution and metering of a radioactive nuclide), U.S. Pat. No. 5,672,876 (method and apparatus for measuring distribution of radioactive nuclide in a subject), and U.S. Pat. No. 6,607,710 (bisphosphonic acid derivative and compound thereof labeled with radioactive nuclide.). The entire disclosure of each of these United States patents is hereby incorporated by reference into this specification.

[0323] Referring again to the aforementioned “CRC Handbook of Chemistry and Physics,” and to pages and in particular to pages B340-B378 thereof, it will be seen that the inorganic atom may be, e.g., cobalt 53, cobalt 54, cobalt 55, cobalt 56, cobalt 57, cobalt 58, cobalt 59, cobalt 60, cobalt 61, cobalt 62, cobalt 63, gadolinium 146, iron 49, iron 51, iron 52, iron 53, iron 54, iron 57, iron 58, iron 59, iron 60, iron 61, iron 62, manganese 50, praseodymium 135, samarium 156, and the like.

[0324] The compound of this invention preferably has a magnetic moment of at least about 0.5 Bohr magnetrons per molecule and, more preferably, at least about 1.0 Bohr magnetrons per molecule. In one embodiment, the compound has a magnetic moment of at least about 2 Bohr magnetrons per molecule.

[0325] As is known to those skilled in the art, a Bohr magnetron is the amount he/4(pi)mc, wherein he is Plank's constant, e and m are the charge and mass of the electron, c is the speed of light, and pi is equal to about 3.14567. Reference may be had, e.g., to U.S. Pat. Nos. 4,687,331, 4,832,877, 4,849,107, 5,040,373 (“(One Bohr magnetron is equal to 9.273×10-24 Joules/Tesla”), U.S. Pat. Nos. 5,169,944, 5,323,227 (“μo is a constant known as the Bohr magnetron at 9.274×10-21 erg/Gauss”), U.S. Pat. Nos. 5,352,979; 6,383,597; 6,725,668; 6,739,137 (“One Bohr magnetron μB is equal to 9.273×10-24 Joules/Tesla”), and the like. The entire disclosure of each of these United States patents is hereby incorporated by reference into this specification.

[0326] In one preferred embodiment, the magnetic compound of this invention is water soluble. As is known to those skilled in the art, solubility of one liquid or solid in another is the mass of the substance contained in a solution which is in equilibrium with an excess of the substance. Under such conditions, the solution is said to be saturated. Reference may be had, e.g., to page F-95 of the CRC “Handbook of Chemistry and Physics,” 53^{rd} Edition (The Chemical Rubber Company, CRC Press Division, 18901 Cranwood Parkway, Cleveland, Ohio, 44128, 1972-1973).

[0327] As used in this specification, the term “water soluble” refers to a solubility of at least 10 micrograms per milliliter and, more preferably, at least 100 micrograms per milliliter; by way of comparison, the solubility of paclitaxel in water is only about 0.4 micrograms per milliliter. One may determine water solubility by conventional means. Thus, e.g., one may mix 0.5 milliliters of water with the compound to be tested under ambient conditions, stir for 18 hours under ambient conditions, filter the slurry thus produced to remove the non-solubulized portion of the fitrand, and calculae how much of the filtrand was solubilized. From this, one can determine the number of micrograms that went into solution.

[0328] In one embodiment, the magnetic compound of this invention has a water solubility of at least 500 micrograms per milliliter, and more preferably at least 1,000 micrograms per milliliter. In yet another embodiment, the magnetic compound of this invention has a water solubility of at least 2500 micrograms per milliliter. In yet another embodiment, the magnetic compound of this invention has a water solubility of at least 5,000 micrograms per milliliter. In yet another embodiment, the magnetic compound of this invention has a water solubility of at least 10,000 micrograms per milliliter.

[0329] In another embodiment, the magnetic compound of this invention has a water solubility of less than about 10 micrograms per milliliter and, preferably, less than about 1.0 micrograms per milliliter.

[0330] Without wishing to be bound to any particular theory, applicants believe that the presence of a hydrophilic group in the compound of their invention helps render such compound water-soluble. Thus, e.g., it is believed that the siderophore group that is present in their preferred compounds aids in creating such water-solubility. As is known to those skilled in the art, a siderophe is one of a number of low molecular weight, iron-containing, or iron binding organic compounds or groups. Siderophores have a strong affinity for Fe³⁺ (which they chelate) and function in the solubilization and transport of iron. Siderophores are classified as belonging to either the phenol-catechol type (such as enterobactin and agrobactin), or the hydroxyamic acid type (such as ferrichome and mycobactin). Reference may be had, e.g., to page 442 of J. Stenesh's “Dictionary of Biochemistry and Molecular Biology,” Second Edition (John Wiley & Sons, New York, N.Y., 1989).

[0331] In one preferred embodiment, the compound of this invention is comprised of one or more siderophore groups bound to a magnetic moiety (such as, e.g., an atom selected from the group consisting of iron, cobalt, nickel, and mixtures thereof).

[0332] As will be apparent, the inclusion of other hydrophilic groups into otherwise water-insoluble compounds is contemplated. Thus, by way of illustration and not limitation, and in place of or in addition to such siderophore group, one use hydrophilic groups such as the siderophore group(s) described hereinabove, hydroxyl groups, carboxyl groups, amino groups, organometallic ionic structures, phosphate groups, and the like. In one preferred aspect of this embodiment, the hydrophilic group utilized should preferably be biologically inert.

[0333] In one embodiment, the magnetic compound of this invention has an association rate with microtubules of at least 3,500,000/mole/second. The association rate may be determined in accordance with the procedure described in an article by J. F. Diaz et al., “Fast Kinetics of Taxol Binding to Microtubules,” Journal of Biological Chemistry, 278(10) 8407-8455. Reference also may be had, e.g., to a paper by J. R. Strobe et al. appearing in the Journal of Biological Chemistry, 275: 26265-26276 (2000). As is disclosed, e.g., in the Diaz et al. paper, “The kinetics of binding and dissociation of Flutax-1 and Flutax-2 were measured by the change of fluorescence intensity using an SS-51 stopped flow device (High-Tech Scientific, UK) equipped with a fluorescence detection system, using an excitation wavelength of 492 and a 530-nm cut-off filter in the emission pathway. The fitting of the kinetic curves was done with a non-linear least squares fitting program based upon the Marquardt algorithm . . . where pseudo-firt order conditions were used . . . .”

[0334] In another embodiment of the invention, the magnetic compound of this invention has a dissociation rate with microtubules, as measured in accordance with the procedure described in such Diaz et al. paper, of less than about 0.08/second, when measured at a temperature of 37 degrees Celsius and under atmospheric conditions. Thus, in this embodiment, the magnetic compound of this invention binds more durably to microtubules than does paclitaxel, which has a dissociation rate of at least 0.91/second.

[0335] In one embodiment, the dissociation rate of the magnetic compound of this invention is less than 0.7/second and, more preferably, less than 0.6/second.

[0336] In one embodiment of this invention, the anti-mitotic compound of the invention has the specified degree of water-solubility and of anti-mitotic activity but does not necessarily possess one or more of the magnetic properties described hereinabove.

Other Magnetic Compounds

[0337] In another embodiment of this invention, other compounds which are not necessarily anti-mitotic are made magnetic by a process comparable to the process described in this specification for making taxanes magnetic.

[0338] In this embodiment, it is preferred to make “magnetic derivatives” of drugs and therapeutic agents. These derivative compounds each preferably have a molecular weight of at least 150 grams per mole, a positive magnetic susceptibility of at least 1,000×10⁻⁶ cgs, and a magnetic moment of at least 0.5 bohr magnetrons, wherein said compound is comprised of at least 7 carbon atoms and at least one inorganic atom with a positive magnetic susceptibility of at least 200×10⁻⁶ cgs.

[0339] Some of the preferred “precursors” used to make these “derivative compounds” are described in the remainder of this section of the specification.

[0340] The precursor materials may be either proteinaceous or non-proteinaceous drugs, as they terms are defined in U.S. Pat. No. 5,194,581, the entire disclosure of which is hereby incorporated by reference into this specification. U.S. Pat. No. 5,194,581 discloses “The drugs with which can be incorporated in the compositions of the invention include non-proteinaceous as well as proteinaceous drugs. The term “non-proteinaceous drugs” encompasses compounds which are classically referred to as drugs such as, for example, mitomycin C, daunorubicin, vinblastine, AZT, and hormones. Similar substances are within the skill of the art. The proteinaceous drugs which can be incorporated in the compositions of the invention include immunomodulators and other biological response modifiers. The term “biological response modifiers” is meant to encompass substances which are involved in modifying the immune response in such manner as to enhance the particular desired therapeutic effect, for example, the destruction of the tumor cells. Examples of immune response modifiers include such compounds as lymphokines. Examples of lymphokines include tumor necrosis factor, the interleukins, lymphotoxin, macrophage activating factor, migration inhibition factor, colony stimulating factor and the interferons. Interferons which can be incorporated into the compositions of the invention include alpha-interferon, beta-interferon, and gamma-interferon and their subtypes. In addition, peptide or polysaccharide fragments derived from these proteinaceous drugs, or independently, can also be incorporated. Also, encompassed by the term “biological response modifiers” are substances generally referred to as vaccines wherein a foreign substance, usually a pathogenic organism or some fraction thereof, is used to modify the host immune response with respect to the pathogen to which the vaccine relates. Those of skill in the art will know, or can readily ascertain, other substances which can act as proteinaceous drugs.”

[0341] The precursor may be a lectin, as is disclosed in U.S. Pat. No. 5,176,907, the entire disclosure of which is hereby incorporated by reference into this specification. This United States patent discloses “Lectins are proteins, usually isolated from plant material, which bind to specific sugar moieties. Many lectins are also able to agglutinate cells and stimulate lymphocytes. Other therapeutic agents which can be used therapeutically with the biodegradable compositions of the invention are known, or can be easily ascertained, by those of ordinary skill in the art.”

[0342] The precursor material may be an amorphous water-soluble pharmaceutical agent, as is disclosed in U.S. Pat. No. 6,117,455, the entire disclosure of which is hereby incorporated by reference into this specification. As is disclosed in the abstract of this patent, there is provided “A sustained-release microcapsule contains an amorphous water-soluble pharmaceutical agent having a particle size of from 1 nm-10 μm and a polymer. The microcapsule is produced by dispersing, in an aqueous phase, a dispersion of from 0.001-90% (w/w) of an amorphous water-soluble pharmaceutical agent in a solution of a polymer having a wt. avg. molecular weight of 2,000 in an organic solvent to prepare an s/o/w emulsion and subjecting the emulsion to in-water drying.”

[0343] In one embodiment, and referring to U.S. Pat. No. 5,420,105 (the entire disclosure of which is hereby incorporated by reference into this specification), the precursor material is selected from the group consisting of an anti-cancer anthracycline antibiotic, cis-platinum, methotrexate, vinblastine, mitoxanthrone ARA-C, 6-mercaptopurine, 6-mercaptoguanosine, mytomycin C and a steroid.

[0344] By way of further illustration, the precursor material is selected from the group consisting of antithrombogenic agents, antiplatelet agents, prostaglandins, thrombolytic drugs, antiproliferative drugs, antirejection drugs, antimicrobial drugs, growth factors, and anticalcifying agents.

[0345] By way of yet further illustration, the precursor material may, e.g., be any one or more of the therapeutic agents disclosed in column 5 of U.S. Pat. No. 5,464,650. Thus, and referring to such column 5, “The therapeutic substance used in the present invention could be virtually any therapeutic substance which possesses desirable therapeutic characteristics for application to a blood vessel. This can include both solid substances and liquid substances. For example, glucocorticoids (e.g. dexamethasone, betamethasone), heparin, hirudin, tocopherol, angiopeptin, aspirin, ACE inhibitors, growth factors, oligonucleotides, and, more generally, antiplatelet agents, anticoagulant agents, antimitotic agents, antioxidants, antimetabolite agents, and anti-inflammatory agents could be used. Antiplatelet agents can include drugs such as aspirin and dipyridamole. Aspirin is classified as an analgesic, antipyretic, anti-inflammatory and antiplatelet drug. Dypridimole is a drug similar to aspirin in that it has anti-platelet characteristics. Dypridimole is also classified as a coronary vasodilator. Anticoagulant agents can include drugs such as heparin, coumadin, protamine, hirudin and tick anticoagulant protein. Antimitotic agents and antimetabolite agents can include drugs such as methotrexate, azathioprine, vincristine, vinblastine, fluorouracil, adriamycin and mutamycin.”

[0346] The precursors material may be one or more of the drugs disclosed in U.S. Pat. No. 5,599,352, the entire disclosure of which is hereby incorporated by reference into this specification. As is disclosed in this patent, “Examples of drugs that are thought to be useful in the treatment of restenosis are disclosed in published international patent application WO9112779 “Intraluminal Drug Eluting Prosthesis” which is incorporated herein by reference. Therefore, useful drugs for treatment of restenosis and drugs that can be incorporated in the fibrin and used in the present invention can include drugs such as anticoagulant drugs, antiplatelet drugs, antimetabolite drugs, anti-inflammatory drugs and antimitotic drugs. Further, other vasoreactive agents such as nitric oxide releasing agents could also be used . . . . By this method, drugs such as glucocorticoids (e.g. dexamethasone, betamethasone), heparin, hirudin, tocopherol, angiopeptin, aspirin, ACE inhibitors, growth factors, oligonucleotides, and, more generally, antiplatelet agents, anticoagulant agents, antimitotic agents, antioxidants, antimetabolite agents, and anti-inflammatory agents can be applied to a stent . . . .”

[0347] By way of yet further illustration, and referring to U.S. Pat. No. 5,605,696 (the entire disclosure of which is hereby incorporated by reference into this specification), the precursor may be a “selected therapeutic drug” that may be, e.g., “ . . . anticoagulant antiplatelet or antithrombin agents such as heparin, D-phe-pro-arg-chloromethylketone (synthetic antithrombin), dipyridamole, hirudin, recombinant hirudin, thrombin inhibitor (available from Biogen), or c7E3 (an antiplatelet drug from Centocore); cytostatic or antiproliferative agents such as angiopeptin (a somatostatin analogue from Ibsen), angiotensin converting enzyme inhibitors such as Captopril (available from Squibb), Cilazapril (available from Hoffman-LaRoche), or Lisinopril (available from Merk); calcium channel blockers (such as Nifedipine), colchicine, fibroblast growth factor (FGF) antagonists, fish oil (omega 3-fatty acid), low molecular weight heparin (available from Wyeth, and Glycomed), histamine antagonists, Lovastatin (an inhibitor of HMG-CoA reductase, a cholesterol lowering drug from Merk), methotrexate, monoclonal antibodies (such as to PDGF receptors), nitroprusside, phosphodiesterase inhibitors, prostacyclin and prostacyclin analogues, prostaglandin inhibitor (available from Glaxo), Seramin (a PDGF antagonist), serotonin blockers, steroids, thioprotease inhibitors, and triazolopyrimidine (a PDGF antagonist). Other therapeutic drugs which may be appropriate include alpha interferon and genetically engineered epithelial cells, for example.”

[0348] By way of yet further illustration, and referring to U.S. Pat. No. 5,700,286 (the entire disclosure of which is hereby incorporated by reference into this specification), precursor material may be a therapeutic agent or drug “ . . . including, but not limited to, antiplatelets, antithrombins, cytostatic and antiproliferative agents, for example, to reduce or prevent restenosis in the vessel being treated. The therapeutic agent or drug is preferably selected from the group of therapeutic agents or drugs consisting of sodium heparin, low molecular weight heparin, hirudin, argatroban, forskolin, vapiprost, prostacyclin and prostacyclin analogues, dextran, D-phe-pro-arg-chloromethylketone, dipyridamole, glycoprotein IIb/IIIa platelet membrane receptor antibody, recombinant hirudin, thrombin inhibitor, angiopeptin, angiotensin converting enzyme inhibitors, (such as Captopril, available from Squibb; Cilazapril, available for Hoffman-La Roche; or Lisinopril, available from Merck) calcium channel blockers, colchicine, fibroblast growth factor antagonists, fish oil, omega 3-fatty acid, histamine antagonists, HMG-CoA reductase inhibitor, methotrexate, monoclonal antibodies, nitroprusside, phosphodiesterase inhibitors, prostaglandin inhibitor, seramin, serotonin blockers, steroids, thioprotease inhibitors, triazolopyrimidine and other PDGF antagonists, alpha-interferon and genetically engineered epithelial cells, and combinations thereof.”

[0349] By way of yet further illustration, and referring to U.S. Pat. No. 5,900,433 (the entire disclosure of which is hereby incorporated by reference into this specification), the precursor material may be a congener of an endothelium-derived bioactive composition of matter. This congener is discussed in column 7 of the patent, wherein it is disclosed that “We have discovered that administration of a congener of an endothelium-derived bioactive agent, more particularly a nitrovasodilator, representatively the nitric oxide donor agent sodium nitroprusside, to an extravascular treatment site, at a therapeutically effective dosage rate, is effective for abolishing CFR's while reducing or avoiding systemic effects such as supression of platelet function and bleeding . . . congeners of an endothelium-derived bioactive agent include prostacyclin, prostaglandin E1, and a nitrovasodilator agent. Nitrovasodilater agents include nitric oxide and nitric oxide donor agents, including L-arginine, sodium nitroprusside and nitroglycycerine.”

[0350] By way of yet further illustration, the precursor material may be heparin. As is disclosed in U.S. Pat. No. 6,120,536 (the entire disclosure of which is hereby incorporated by reference into this specification), “While heparin is preferred as the incorporated active material, agents possibly suitable for incorporation include antithrobotics, anticoagulants, antibiotics, antiplatelet agents, thorombolytics, antiproliferatives, steroidal and non-steroidal antinflammatories, agents that inhibit hyperplasia and in particular restenosis, smooth muscle cell inhibitors, growth factors, growth factor inhibitors, cell adhesion inhibitors, cell adhesion promoters and drugs that may enhance the formation of healthy neointimal tissue, including endothelial cell regeneration.”

[0351] By way of yet further illustration, and referring to U.S. Pat. No. 6,624,138 (the entire disclosure of which is hereby incorporated by reference into this specification), the precursor material may be one or more of the drugs described in this patent. Thus, and referring to columns 9 et seq. of such patent, “Straub et al. in U.S. Pat. No. 6,395,300 discloses a wide variety of drugs that are useful in the methods and compositions described herein, entire contents of which, including a variety of drugs, are incorporated herein by reference. Drugs contemplated for use in the compositions described in U.S. Pat. No. 6,395,300 and herein disclosed include the following categories and examples of drugs and alternative forms of these drugs such as alternative salt forms, free acid forms, free base forms, and hydrates: analgesics/antipyretics. (e.g., aspirin, acetaminophen, ibuprofen, naproxen sodium, buprenorphine, propoxyphene hydrochloride, propoxyphene napsylate, meperidine hydrochloride, hydromorphone hydrochloride, morphine, oxycodone, codeine, dihydrocodeine bitartrate, pentazocine, hydrocodone bitartrate, levorphanol, diflunisal, trolamine salicylate, nalbuphine hydrochloride, mefenamic acid, butorphanol, choline salicylate, butalbital, phenyltoloxamine citrate, diphenhydramine citrate, methotrimeprazine, cinnamedrine hydrochloride, and meprobamate); antiasthamatics (e.g., ketotifen and traxanox); antibiotics (e.g., neomycin, streptomycin, chloramphenicol, cephalosporin, ampicillin, penicillin, tetracycline, and ciprofloxacin); antidepressants (e.g., nefopam, oxypertine, doxepin, amoxapine, trazodone, amitriptyline, maprotiline, pheneizine, desipramine, nortriptyline, tranylcypromine, fluoxetine, doxepin, imipramine, imipramine pamoate, isocarboxazid, trimipramine, and protriptyline); antidiabetics (e.g., biguanides and sulfonylurea derivatives); antifungal agents (e.g., griseofulvin, ketoconazole, itraconizole, amphotericin B, nystatin, and candicidin); antihypertensive agents (e.g., propanolol, propafenone, oxyprenolol, nifedipine, reserpine, trimethaphan, phenoxybenzamine, pargyline hydrochloride, deserpidine, diazoxide, guanethidine monosulfate, minoxidil, rescinnamine, sodium nitroprusside, rauwolfia serpentina, alseroxylon, and phentolamine); anti-inflammatories (e.g., (non-steroidal) indomethacin, ketoprofen, flurbiprofen, naproxen, ibuprofen, ramifenazone, piroxicam, (steroidal) cortisone, dexamethasone, fluazacort, celecoxib, rofecoxib, hydrocortisone, prednisolone, and prednisone); antineoplastics (e.g., cyclophosphamide, actinomycin, bleomycin, daunorubicin, doxorubicin, epirubicin, mitomycin, methotrexate, fluorouracil, carboplatin, carmustine (BCNU), methyl-CCNU, cisplatin, etoposide, camptothecin and derivatives thereof, phenesterine, paclitaxel and derivatives thereof, docetaxel and derivatives thereof, vinblastine, vincristine, tamoxifen, and piposulfan); antianxiety agents (e.g., lorazepam, buspirone, prazepam, chlordiazepoxide, oxazepam, clorazepate dipotassium, diazepam, hydroxyzine pamoate, hydroxyzine hydrochloride, alprazolam, droperidol, halazepam, chlormezanone, and dantrolene); immunosuppressive agents (e.g., cyclosporine, azathioprine, mizoribine, and FK506 (tacrolimus)); antimigraine agents (e.g., ergotamine, propanolol, isometheptene mucate, and dichloralphenazone); sedatives/hypnotics (e.g., barbiturates such as pentobarbital, pentobarbital, and secobarbital; and benzodiazapines such as flurazepam hydrochloride, triazolam, and midazolam); antianginal agents (e.g., beta-adrenergic blockers; calcium channel blockers such as nifedipine, and diltiazem; and nitrates such as nitroglycerin, isosorbide dinitrate, pentearythritol tetranitrate, and erythrityl tetranitrate); antipsychotic agents (e.g., haloperidol, loxapine succinate, loxapine hydrochloride, thioridazine, thioridazine hydrochloride, thiothixene, fluphenazine, fluphenazine decanoate, fluphenazine enanthate, trifluoperazine, chlorpromazine, perphenazine, lithium citrate, and prochlorperazine); antimanic agents (e.g., lithium carbonate); antiarrhythmics (e.g., bretylium tosylate, esmolol, verapamil, amiodarone, encainide, digoxin, digitoxin, mexiletine, disopyramide phosphate, procainamide, quinidine sulfate, quinidine gluconate, quinidine polygalacturonate, flecainide acetate, tocainide, and lidocaine); antiarthritic agents (e.g., phenylbutazone, sulindac, penicillanine, salsalate, piroxicam, azathioprine, indomethacin, meclofenamate, gold sodium thiomalate, ketoprofen, auranofin, aurothioglucose, and tolmetin sodium); antigout agents (e.g., colchicine, and allopurinol); anticoagulants (e.g., heparin, heparin sodium, and warfarin sodium); thrombolytic agents (e.g., urokinase, streptokinase, and alteplase); antifibrinolytic agents (e.g., aminocaproic acid); hemorheologic agents (e.g., pentoxifylline); antiplatelet agents (e.g., aspirin); anticonvulsants (e.g., valproic acid, divalproex sodium, phenyloin, phenyloin sodium, clonazepam, primidone, phenobarbitol, carbamazepine, amobarbital sodium, methsuximide, metharbital, mephobarbital, mephenyloin, phensuximide, paramethadione, ethotoin, phenacemide, secobarbitol sodium, clorazepate dipotassium, and trimethadione); antiparkinson agents (e.g., ethosuximide); antihistamines/antipruritics (e.g., hydroxyzine, diphenhydramine, chlorpheniramine, brompheniramine maleate, cyproheptadine hydrochloride, terfenadine, clemastine fumarate, triprolidine, carbinoxamine, diphenylpyraline, phenindamine, azatadine, tripelennamine, dexchlorpheniramine maleate, methdilazine; agents useful for calcium regulation (e.g., calcitonin, and parathyroid hormone); antibacterial agents (e.g., amikacin sulfate, aztreonam, chloramphenicol, chloramphenicol palirtate, ciprofloxacin, clindamycin, clindamycin palmitate, clindamycin phosphate, metronidazole, metronidazole hydrochloride, gentamicin sulfate, lincomycin hydrochloride, tobramycin sulfate, vancomycin hydrochloride, polymyxin B sulfate, colistimethate sodium, and colistin sulfate); antiviral agents (e.g., interferon alpha, beta or gamma, zidovudine, amantadine hydrochloride, ribavirin, and acyclovir); antimicrobials (e.g., cephalosporins such as cefazolin sodium, cephradine, cefaclor, cephapirin sodium, ceftizoxime sodium, cefoperazone sodium, cefotetan disodium, cefuroxime e azotil, cefotaxime sodium, cefadroxil monohydrate, cephalexin, cephalothin sodium, cephalexin hydrochloride monohydrate, cefamandole nafate, cefoxitin sodium, cefonicid sodium, ceforanide, ceftriaxone sodium, ceftazidime, cefadroxil, cephradine, and cefuroxime sodium; penicillins such as ampicillin, amoxicillin, penicillin G benzathine, cyclacillin, ampicillin sodium, penicillin G potassium, penicillin V potassium, piperacillin sodium, oxacillin sodium, bacampicillin hydrochloride, cloxacillin sodium, ticarcillin disodium, azlocillin sodium, carbenicillin indanyl sodium, penicillin G procaine, methicillin sodium, and nafcillin sodium; erythromycins such as erythromycin ethylsuccinate, erythromycin, erythromycin estolate, erythromycin lactobionate, erythromycin stearate, and erythromycin ethylsuccinate; and tetracyclines such as tetracycline hydrochloride, doxycycline hyclate, and minocycline hydrochloride, azithromycin, clarithromycin); anti-infectives (e.g., GM-CSF); bronchodilators (e.g., sympathomimetics such as epinephrine hydrochloride, metaproterenol sulfate, terbutaline sulfate, isoetharine, isoetharine mesylate, isoetharine hydrochloride, albuterol sulfate, albuterol, bitolterolmesylate, isoproterenol hydrochloride, terbutaline sulfate, epinephrine bitartrate, metaproterenol sulfate, epinephrine, and epinephrine bitartrate; anticholinergic agents such as ipratropium bromide; xanthines such as aminophylline, dyphylline, metaproterenol sulfate, and aminophylline; mast cell stabilizers such as cromolyn sodium; inhalant corticosteroids such as beclomethasone dipropionate (BDP), and beclomethasone dipropionate monohydrate; salbutamol; ipratropium bromide; budesonide; ketotifen; salmeterol; xinafoate; terbutaline sulfate; triamcinolone; theophylline; nedocromil sodium; metaproterenol sulfate; albuterol; flunisolide; fluticasone proprionate; steroidal compounds and hormones (e.g., androgens such as danazol, testosterone cypionate, fluoxymesterone, ethyltestosterone, testosterone enathate, methyltestosterone, fluoxymesterone, and testosterone cypionate; estrogens such as estradiol, estropipate, and conjugated estrogens; progestins such as methoxyprogesterone acetate, and norethindrone acetate; corticosteroids such as triamcinolone, betamethasone, betamethasone sodium phosphate, dexamethasone, dexamethasone sodium phosphate, dexamethasone acetate, prednisone, methylprednisolone acetate suspension, triamcinolone acetonide, methylprednisolone, prednisolone sodium phosphate, methylprednisolone sodium succinate, hydrocortisone sodium succinate, triamcinolone hexacetonide, hydrocortisone, hydrocortisone cypionate, prednisolone, fludrocortisone acetate, paramethasone acetate, prednisolone tebutate, prednisolone acetate, prednisolone sodium phosphate, and hydrocortisone sodium succinate; and thyroid hormones such as levothyroxine sodium); hypoglycemic agents (e.g., human insulin, purified beef insulin, purified pork insulin, glyburide, chlorpropamide, glipizide, tolbutamide, and tolazamide); hypolipidemic agents (e.g., clofibrate, dextrothyroxine sodium, probucol, pravastitin, atorvastatin, lovastatin, and niacin); proteins (e.g., DNase, alginase, superoxide dismutase, and lipase); nucleic acids (e.g., sense or anti-sense nucleic acids encoding any therapeutically useful protein, including any of the proteins described herein); agents useful for erythropoiesis stimulation (e.g., erythropoietin); antiulcer/antireflux agents (e.g., famotidine, cimetidine, and ranitidine hydrochloride); antinauseants/antiemetics (e.g., meclizine hydrochloride, nabilone, prochlorperazine, dimenhydrinate, promethazine hydrochloride, thiethylperazine, and scopolamine); as well as other drugs useful in the compositions and methods described herein include mitotane, halonitrosoureas, anthrocyclines, ellipticine, ceftriaxone, ketoconazole, ceftazidime, oxaprozin, albuterol, valacyclovir, urofollitropin, famciclovir, flutamide, enalapril, mefformin, itraconazole, buspirone, gabapentin, fosinopril, tramadol, acarbose, lorazepan, follitropin, glipizide, omeprazole, fluoxetine, lisinopril, tramsdol, levofloxacin, zafirlukast, interferon, growth hormone, interleukin, erythropoietin, granulocyte stimulating factor, nizatidine, bupropion, perindopril, erbumine, adenosine, alendronate, alprostadil, benazepril, betaxolol, bleomycin sulfate, dexfenfluramine, diltiazem, fentanyl, flecainid, gemcitabine, glatiramer acetate, granisetron, lamivudine, mangafodipir trisodium, mesalamine, metoprolol fumarate, metronidazole, miglitol, moexipril, monteleukast, octreotide acetate, olopatadine, paricalcitol, somatropin, sumatriptan succinate, tacrine, verapamil, nabumetone, trovafloxacin, dolasetron, zidovudine, finasteride, tobramycin, isradipine, tolcapone, enoxaparin, fluconazole, lansoprazole, terbinafine, pamidronate, didanosine, diclofenac, cisapride, venlafaxine, troglitazone, fluvastatin, losartan, imiglucerase, donepezil, olanzapine, valsartan, fexofenadine, calcitonin, and ipratropium bromide. These drugs are generally considered to be water soluble.” Any of these water-soluble drugs may be used as precursors in the process of this invention to make a composition with the desired magnetic properties.

[0352] As is also disclosed in U.S. Pat. No. 6,624,138, “Preferred drugs useful in the present invention may include albuterol, adapalene, doxazosin mesylate, mometasone furoate, ursodiol, amphotericin, enalapril maleate, felodipine, nefazodone hydrochloride, valrubicin, albendazole, conjugated estrogens, medroxyprogesterone acetate, nicardipine hydrochloride, zolpidem tartrate, amlodipine besylate, ethinyl estradiol, omeprazole, rubitecan, amlodipine besylate/benazepril hydrochloride, etodolac, paroxetine hydrochloride, paclitaxel, atovaquone, felodipine, podofilox, paricalcitol, betamethasone dipropionate, fentanyl, pramipexole dihydrochloride, Vitamin D3 and related analogues, finasteride, quetiapine fumarate, alprostadil, candesartan, cilexetil, fluconazole, ritonavir, busulfan, carbamazepine, flumazenil, risperidone, carbemazepine, carbidopa, levodopa, ganciclovir, saquinavir, amprenavir, carboplatin, glyburide, sertraline hydrochloride, rofecoxib carvedilol, halobetasolproprionate, sildenafil citrate, celecoxib, chlorthalidone, imiquimod, simvastatin, citalopram, ciprofloxacin, irinotecan hydrochloride, sparfloxacin, efavirenz, cisapride monohydrate, lansoprazole, tamsulosin hydrochloride, mofafinil, clarithromycin, letrozole, terbinafine hydrochloride, rosiglitazone maleate, diclofenac sodium, lomefloxacin hydrochloride, tirofiban hydrochloride, telmisartan, diazapam, loratadine, toremifene citrate, thalidomide, dinoprostone, mefloquine hydrochloride, trandolapril, docetaxel, mitoxantrone hydrochloride, tretinoin, etodolac, triamcinolone acetate, estradiol, ursodiol, nelfinavir mesylate, indinavir, beclomethasone dipropionate, oxaprozin, flutamide, famotidine, nifedipine, prednisone, cefuroxime, lorazepam, digoxin, lovastatin, griseofulvin, naproxen, ibuprofen, isotretinoin, tamoxifen citrate, nimodipine, amiodarone, and alprazolam. Specific non-limiting examples of some drugs that fall under the above categories include paclitaxel, docetaxel and derivatives, epothilones, nitric oxide release agents, heparin, aspirin, coumadin, PPACK, hirudin, polypeptide from angiostatin and endostatin, methotrexate, 5-fluorouracil, estradiol, P-selectin Glycoprotein ligand-1 chimera, abciximab, exochelin, eleutherobin and sarcodictyin, fludarabine, sirolimus, tranilast, VEGF, transforming growth factor (TGF)-beta, Insulin-like growth factor (IGF), platelet derived growth factor (PDGF), fibroblast growth factor (FGF), RGD peptide, beta or gamma ray emitter (radioactive) agents, and dexamethasone, tacrolimus, actinomycin-D, batimastat etc.” These drugs also may be used in the process of this invention to make magnetic compositions.

Another Preferred Compound of the Invention

[0353] In another embodiment of this invention, there is provided a compound that, in spite of having a molecular weight in excess of 550, still has a water solubility in excess of about 10 micrograms per milliliter. In particular, there is provided a compound with a molecular weight of at least about 550, a water solubility of at least about 10 micrograms per milliliter, a pKa dissociation constant of from about 1 to about 15, and a partition coefficient of from about 1.0 to about 50.

[0354] The compound of this embodiment of the invention has a molecular weight of at least about 550. In one embodiment, this compound has a molecular weight of at least about 700.

[0355] The water solubility of this compound is at least about 1 micrograms per milliliter and, more preferably, at least about 10 micrograms per milliliter. In one embodiment, such compound has a water solubility of at least about 100 micrograms per milliliter. In yet another embodiment, such compound has a water solubility of at least about 1,000 micrograms per milliliter.

[0356] The compound of this embodiment of the invention has a pKa dissociation constant of from about 1 to about 15. As used herein, the term “pKa dissociation constant” is equal to −log Kₐ, wherein Kₐ is equal to [H₃O⁺][A⁻]/[HA], wherein the square brackets ([ ]) indicate concentration, and wherein A is the counterion. Reference may be had, e.g., to pages 327-328 of Maitland Jones, Jr.'s “Organic Chemistry” (W. M. Norton & Company, New York, N.Y., 1997). Reference may also be had, e.g., to U.S. Pat. Nos. 5,036,164; 5,025,063; 5,767,066; 5,155,162; 5,132,000; and 5,079,134. The entire disclosure of each of these United States patents is hereby incorporated by reference into this specification

[0357] As is known to those skilled in the art, and as is disclosed at pages 39 et seq. of Stephen H. Curry et al.'s “Manual of Laboratory Pharmacokinetics” (John Wiley & Sons, New York, N.Y., 1983), “Many drugs are weak acids and/or bases. The degree of ionization will influence the absorption, distribution, and excretion in vivo, the solubility at a given pH, the distribution of the drug between aqueous and organic pahses the choice of pH in liquid chromatographic separations, etc . . . . From the above it follows that the pH at which the compound is 50 percent ionized is equal to the pKₐ To determine a value of pKₐ the relative concentrations of ionized and non-ionized forms must be known at a particular pH. Several methods are available, including potentiometric titration, conductimetry, solubility, and spectrometry . . . .”

[0358] The compound of this embodiment of the invention preferably has a partition coefficient of from about 1.0 to about 50. This partition coefficient is also discussed at pages 41 et seq. of the aforementioned Curry book, wherein it is disclosed that: “When a solute is distributed between two immiscible phases, 1 and 2, the ratio of the activities of the solute in the phases is constant. If the solutions are dilute and ideal behavior is assumed, then the ratio of the concentration of the solute will be constant . . . . The constant is known as the partition (or distribution) coefficient . . . . The convention with regard to which phase is classed as 1 and which is as 2 is not entirely clear. Usually, partition coefficients are defined as the concentration in the organic phase divided by the concentration in the aqueous phase.”

[0359] It is preferred to measure the partition coefficient between water and octane. Means for measuring the partition coefficient are well known to those skilled in the art and are described, e.g., in the patent literature. Reference may be had, e.g., to U.S. Pat. Nos. 6,660,288; 6,645,479; 6,585,953; 6,583,136; 6,500,995; 6,475,961; 6.369,001; 6,362,158; 6,315,907; 6,310,013; 6,271,665; 6,218,378; 6,203,817; 6,156,826; 6,124,086; 6,071,409; 6,045,835; 6,042,792; 5,874,481; 5,763,146; 5,555,747; 5,252,320 (complexes having a partition coefficient above 300); U.S. Pat. Nos. 5,254,342; 5,252,320; 5,164,189; 5,071,769; 5,041,523; 5,013,556; 5,011,982; 5,011,967; 4,986,917; 4,980,453; 4,957,862; 4,940,654; 4,886,656; 4,859,584; 4,762,701; 4,746,745; 4,743,550 (method for improving the partition coefficient in enzyme containing systems having at least two phases), U.S. Pat. Nos. 4,736,016; 4,721,730; 4,699,924; 4,619,939; 4,420,473; 4,371,540; 4,363,793; and the like. The entire disclosure of each of these United States patents is hereby incorporated by reference into this specification.

[0360] In one embodiment, the compound of this invention has a tumor uptake of at least about 10 percent and, more preferably, at least about 20 percent. In one embodiment, the tumor uptake is at least about 30 percent. In yet another embodiment, the tumor uptake is at least about 50 percent. In yet another embodiment, the tumor uptake is at least about 70 percent.

[0361] Tumor uptake is the extent to which the compound is selectively taken up by tumors from blood. It may be determined by dissolving 1 milligram of the compound to be tested in 1 milliliter of “Cremophor EL,” a 1:1 (volume/volume) mixture of anhydrous ethanol and polyethoxylated castor oil. For a discussion of such “Cremophor EL,” reference may be had, e.g., to U.S. Pat. No. 5,591,715 (methods and compositions for reducing multidrug resistance), 5,686,488 (polyethoxylated castor oil products as anti-inflammatory agents), 5,776,891 (compositions for reducing multidrug resistance), and the like. The entire disclosure4 of each of these United States patents is hereby incorporated by reference into this specification.

[0362] The mixture of the compound to be tested and “Cremophor EL” is injected ito the blood supply (artery) of a laboratory rat, near the tumor. Thirty seconds later the rate is sacrificed, the tumor is removed, and it and the blood are analyzed for the presence of the compound. Both the arterial blood and the venous drainage beyond the tumor are analyzed. The percent tumor uptake is equal to ([Cₐ−Cᵥ]/Cₐ)×100, wherein Cₐ is the concentration of the compound in the arterial blood, and Cᵥ is the concentration of the compound in the venous blood.

[0363] Other conventional means may be used to determine the tumor uptake. Reference may be had, e.g., to U.S. Pat. Nos. 4,448,762; 5,077,034; 5,094,835; 5,135,717; 5,166,944; 5,284,831; 5,391,547; 5,399,338; 5,474,772; 5,516,940; 5,578,287; 5,595,738; 5,601,800; 5,608,060; 5,616,690; 5,624,798; 5,624,896; 5,683,873; 5,688,501; 5,753,262; 5,762,909; 5,783,169; 5,810,888; 5,811,073; 5,820,873; 5,847,121; 5,869,248; 5,877,162; 5,891,689; 5,902,604; 5,911,969; 5,914,312; 5,955,605; 5,965,598; 5,976,535; 5,976,874;6,008,319; 6,022,522; 6,022,966; 6,025,165; 6,027,725; 6,057,153; 6,074,626; 6,103,889; 6,121,424; 6,165,441; 6,171,577; 6,172,045; 6,197,333; 6,217,869; 6,217,886; 6,235,264; 6,242,477; 6,331,287; 6,348,214; 6,358,490; 6,403,096; 6,426,400; 6,436,708; 6,441,158; 6,458,336; 6,498,181; 6,515,110; 6,537,521; 6,610,478; 6,617,135; 6,620,805; 6,624,187; 6,723,318; 6,734,171; 6,685,915; and the like. The entire disclosure of each of these United States patents is hereby incorporated by reference into this specification.

Guided Delivery of the Compounds of this Invention

[0364] In one preferred embodiment, the magnetic properties of the anti-mitotic compound of this invention are used in order to preferentially deliver such compound to a specified site. In another embodiment, the magnetic properties of the compounds and compositions of this invention which are not necessarily anti-mitotic but have the desired magnetic properties also may be used to deliver such compounds and/or compositions to a desired site.

[0365] Thus, by way of illustration, one may guide delivery of the compound of this invention with conventional magnetic focusing means. In one aspect of this embodiment, a magnetic field of a specified strength is focused onto a desired therapeutic site, such as a tumor to be treated, whereby the compound is selectively drawn to the therapeutic site and binds with tubulin molecules at the site. In one embodiment, the focused magnetic field has a field strength of at least about 6 Tesla in order to cause microtubules to move linearly. The magnetic field may, e.g., be focused for a period of at least about 30 minutes following the administration of the compound of this invention.

[0366] One may use any of the conventional magnetic field generators known to those skilled in the art to produce such a magnetic field. Thus, e.g., one may use one or more of the magnetic field generators disclosed in U.S. Pat. Nos. 6,503,364; 6,377,149 (magnetic field generator for magnetron plasma generation); U.S. Pat. No. 6,353,375 (magnetostatic wave device); U.S. Pat. No. 6,340,888 (magnetic field generator for MRI); U.S. Pat. Nos. 6,336,989; 6,335,617 (device for calibrating a magnetic field generator); U.S. Pat. Nos. 6,313,632; 6,297,634; 6,275,128; 6,246,066 (magnetic field generator and charged particle beam irradiator); U.S. Pat. No. 6,114,929 (magnetostatic wave device); U.S. Pat. No. 6,099,459 (magnetic field generating device and method of generating and applying a magnetic field); U.S. Pat. Nos. 5,795,212; 6,106,380 (deterministic magnetorheological finishing); U.S. Pat. No. 5,839,944 (apparatus for deterministic magnetorheological finishing); U.S. Pat. No. 5,971,835 (system for abrasive jet shaping and polishing of a surface using a magnetorheological fluid); U.S. Pat. Nos. 5,951,369; 6,506,102 (system for magnetorheological finishing of substrates); U.S. Pat. Nos. 6,267,651; 6,309,285 (magnetic wiper); U.S. Pat. No. 5,929,732 and U.S. Pat. No. 6,488,615 (which describe devices and methods for creating a high intensity magnetic field for magnetically guiding a anti-mitotic compound to a predetermined site within a biological organism), and the like. The entire disclosure of each of these United States patents is hereby incorporated by reference into this specification.

The Use of Externally Applied Energy to Affect an Implanted Medical Device

[0367] The prior art discloses many devices in which an externally applied electromagnetic field (i.e., a field originating outside of a biological organism, such as a human body) is generated in order to influence one or more implantable devices disposed within the biological organism; these may be used in conjunction with anti-mitotic compound of this invention. Some of these devices are described below.

[0368] U.S. Pat. No. 3,337,776 describes a device for producing controllable low frequency magnetic fields; the entire disclosure of this patent is hereby incorporated by reference into this specification. Thus, e.g., claim 1 of this patent describes a biomedical apparatus for the treatment of a subject with controllable low frequency magnetic fields, comprising solenoid means for creating the magnetic field. These low-frequency magnetic fields may be used to affect the anti-mitotic compounds of this invention, and/or tubulin and/or microtubules and/or other moieties.

[0369] U.S. Pat. No. 3,890,953 also discloses an apparatus for promoting the growth of bone and other body tissues by the application of a low frequency alternating magnetic field; the entire disclosure of this United States patent is hereby incorporated by reference into this specification. This patent claims “In an electrical apparatus for promoting the growth of bone and other body tissues by the application thereto of a low frequency alternating magnetic field, such apparatus having current generating means and field applicator means, the improvement wherein the applicator means comprises a flat solenoid coil having an axis about which the coil is wound and composed of a plurality of parallel and flexible windings, each said winding having two adjacent elongate portions and two 180° coil bends joining said elongate portions together, said coil being flexible in the coil plane in the region of said elongate portion for being bent into a U-shape, said coil being bent into such U-shape about an axis parallel to the coil axis and adapted for connection to a source of low frequency alternating current.” These low-frequency magnetic fields may be used to affect the anti-mitotic compounds of this invention, and/or tubulin and/or microtubules and/or other moieties.

[0370] The device of U.S. Pat. No. 3,890,953 is described, in part, at lines 52 et seq. of column 2, wherein it is disclosed that: “ . . . The apparatus shown diagrammatically in FIG. 1 comprises a AC generator 10, which supplies low frequency AC at the output terminals 12. The frequency of the AC lies below 150 Hz, for instance between 1 and 50 or 65 Hz. It has been found particularly favorable to use a frequency range between 5 or 10 and 30 Hz, for example 25 Hz. The half cycles of the alternating current should have comparatively gently sloping leading and trailing flanks (rise and fall times of the half cycles being for example in the order of magnitude of a quarter to an eighth of the length of a cycle); the AC can thus be a sinusoidal current with a low non-linear distortion, for example less than 20 percent, or preferably less than 10 percent, or a triangular wave current.”

[0371] U.S. Pat. No. 4,095,588 discloses a “vascular cleansing device” adapted to “ . . . effect motion of the red corpuscles in the blood stream of a vascular system . . . whereby these red cells may cleanse the vascular system by scrubbing the walls thereof . . . ;” the entire disclosure of this United States patent is hereby incorporated by reference into this specification. This patent claims (in claim 3) “A means to propel a red corpuscle in a vibratory and rotary fashion, said means comprising an electronic circuit and magnetic means including: a source of electrical energy; a variable oscillator connected to said source; a binary counter means connected to said oscillator to produce sequential outputs; a plurality of deflection amplifier means connected to be operable by the outputs of said binary counter means in a sequential manner, said amplifier means thereby controlling electrical energy from said source; a plurality of separate coils connected in separate pairs about an axis in series between said deflection amplifier means and said source so as to be sequentially operated in creating an electromagnetic field from one coil to the other and back again and thence to adjacent separate coils for rotation of the electromagnetic field from one pair of coils to another; and a table within the space encircled by said plurality of coils, said table being located so as to place a person along the axis such that the red corpuscles of the person's vascular system are within the electromagnetic field between the coils creating same.” The energy used to affect such red blood corpuscles may also be used affect the anti-mitotic compounds of this invention, and/or tubulin and/or microtubules and/or other moieties.

[0372] U.S. Pat. No. 4,323,075 discloses an implantable defibrillator with a rechargeable power supply; the entire disclosure of this patent is hereby incorporated by reference into this specification. Claim 1 of this patent describes “A fully implantable power supply for use in a fully implantable defibrillator having an implantable housing, a fibrillation detector for detecting fibrillation of the heart of a recipient, an energy storage and discharge device for storing and releasing defibrillation energy into the heart of the recipient and an inverter for charging the energy storage and discharge device in response to detection of fibrillation by the fibrillation detector, the inverter requiring a first level of power to be operational and the fibrillation detector requiring a second level of power different from said first level of power to be operational, said power supply comprising: implantable battery means positioned within said implantable housing, said battery means including a plurality of batteries arranged in series, each of said batteries having a pair of output terminals, each of said batteries producing a distinctly multilevel voltage across its pair of output terminals, said voltage being at a first level when the battery is fully charged and dropping to a second level at some point during the discharge of the battery; and implantable circuit means positioned within said implantable housing, said circuit means for creating a first conductive path between said serially-connected batteries and said fibrillation detector to provide said fibrillation detector with said second level of power, and for creating a second conductive path between said inverter and said battery means by placing only the batteries operating at said first level voltage in said second conductive path, and excluding the remaining batteries from said second conductive path to provide said inverter with said first level of power.” The power supply of this patent may be used to power, e.g., one or more magnetic focusing devices.

[0373] U.S. Pat. No. 4,340,038 discloses an implanted medical system comprised of magnetic field pick-up means for converting magnetic energy to electrical energy; the entire disclosure of this patent is hereby incorporated by reference into this specification. One may use the electrical energy produced by such pick-up means to affect the anti-mitotic compounds of this invention, and/or tubulin and/or microtubules and/or other moieties. Such energy may also be used to power an implanted magnetic focusing device.

[0374] In column 1 of U.S. Pat. No. 4,340,038, at lines 12 et seq., it is disclosed that “Many types of implantable devices incorporate a self-contained transducer for converting magnetic energy from an externally-located magnetic field generator to energy usable by the implanted device. In such a system having an implanted device and an externally-located magnetic field generator for powering the device, sizing and design of the power transfer system is important. In order to properly design the power transfer system while at the same time avoiding overdesign, the distance from the implanted device to the magnetic field generator must be known. However for some types of implanted devices the depth of the implanted device in a recipient's body is variable, and is not known until the time of implantation by a surgeon. One example of such a device is an intracranial pressure monitoring device (ICPM) wherein skull thickness varies considerably between recipients and the device must be located so that it protrudes slightly below the inner surface of the skull and contacts the dura, thereby resulting in a variable distance between the top of the implanted device containing a pick-up coil or transducer and the outer surface of the skull. One conventional technique for accommodating an unknown distance between the magnetic field generator and the implanted device includes increasing the transmission power of the external magnetic field generator. However this increased power can result in heating of the implanted device, the excess heat being potentially hazardous to the recipient. A further technique has been to increase the diameter of the pick-up coil in the implanted device. However, physical size constraints imposed on many implanted devices such as the ICPM are critical; and increasing the diameter of the pick-up coil is undesirable in that it increases the size of the orifice which must be formed in the recipient's skull. The concentrator of the present invention solves the above problems by concentrating magnetic lines of flux from the magnetic generator at the implanted pick-up coil, the concentrator being adapted to accommodate distance variations between the implanted device and the magnetic field generator.’

[0375] Claim 1 of U.S. Pat. No. 4,340,038 describes “In a system including an implanted device having a magnetic field pick-up means for converting magnetic energy to electrical energy for energizing said implanted device, and an external magnetic field generator located so that magnetic lines of flux generated thereby intersect said pick-up means, a means for concentrating a portion of said magnetic lines of flux at said pick-up means comprising a metallic slug located between said generator and said pick-up means, thereby concentrating said magnetic lines of flux at said pick-up means. “Claim 5 of this patent further describes the pick-up means as comprising “ . . . a magnetic pick-up coil and said slug is formed in the shape of a truncated cone and oriented so that a plane defined by the smaller of said cone end surfaces is adjacent to said substantially parallel to a plane defined by said magnetic pick-up coil.” In one embodiment, such pick-up means may be located near the site to be treated (such as a tumor) and may be used to affect the tumor by, e.g., hyperthermia treatment.

[0376] U.S. Pat. No. 4,361,153 discloses an implantable telemetry system; the entire disclosure of such United States patent is hereby incorporated by reference into this specification. Such an implantable telemetry system, equipped with a multiplicity of sensors, may be used to report how the anti-mitotic compounds of this invention, and/or tubulin and/or microtubules and/or other moieties respond to applied electromagnetic fields.

[0377] As is disclosed at column 1 of U.S. Pat. No. 4,361,153 (see lines 9 et seq.), “Externally applied oscillating magnetic fields have been used before with implanted devices. Early inductive cardiac pacers employed externally generated electromagnetic energy directly as a power source. A coil inside the implant operated as a secondary transformer winding and was interconnected with the stimulating electrodes. More recently, implanted stimulators with rechargeable (e.g., nickel cadmium) batteries have used magnetic transmission to couple energy into a secondary winding in the implant to energize a recharging circuit having suitable rectifier circuitry. Miniature reed switches have been utilized before for implant communications. They appear to have been first used to allow the patient to convert from standby or demand mode to fixed rate pacing with an external magnet. Later, with the advent of programmable stimulators, reed switches were rapidly cycled by magnetic pulse transmission to operate pulse parameter selection circuitry inside the implant. Systems analogous to conventional two-way radio frequency (RF) and optical communication system have also been proposed. The increasing versatility of implanted stimulators demands more complex programming capabilities. While various systems for transmitting data into the implant have been proposed, there is a parallel need to develop compatible telemetry systems for signalling out of the implant. However, the austere energy budget constraints imposed by long life, battery operated implants rule out conventional transmitters and analogous systems”

[0378] The solution provided by U.S. Pat. No. 4,361,153 is “ . . . achieved by the use of a resonant impedance modulated transponder in the implant to modulate the phase of a relatively high energy reflected magnetic carrier imposed from outside of the body.” In particular, and as is described by claim 1 of this patent, there is claimed “An apparatus for communicating variable information to an external device from an electronic stimulator implanted in a living human patient, comprising an external unit including means for transmitting a carrier signal, a hermetically sealed fully implantable enclosure adapted to be implanted at a fixed location in the patient's body, means within said enclosure for generating stimulator outputs, a transponder within said enclosure including tuned resonant circuit means for resonating at the frequency of said carrier signal so as to re-radiate a signal at the frequency of said carrier signal, and means for superimposing an information signal on the reflected signal by altering the resonance of said tuned circuit means in accordance with an information signal, said superimposing means including a variable impedance load connected across said tuned circuit and means for varying the impedance of said load in accordance with an information signal, said external unit further including pickup means for receiving the reflected signal from said transponder and means for recovering the information signal superimposed thereon, said receiving means including means responsive to said reflected signal from said transponder for producing on associated analog output signal, and said recovering means including phase shift detector means responsive to said analog output signal for producing an output signal related to the relative phase angle thereof.”

[0379] U.S. Pat. No. 4,408,607 discloses a rechargeable, implantable capacitive energy source; the entire disclosure of this patent is hereby incorporated into this specification by reference; and this source may be used to directly or indirectly supply energy to one or more of the anti-mitotic compounds of this invention, and/or tubulin and/or microtubules and/or other moieties. As is disclosed in column 1 of such patent (at lines 12 et seq.), “Medical science has advanced to the point where it is possible to implant directly within living bodies electrical devices necessary or advantageous to the welfare of individual patients. A problem with such devices is how to supply the electrical energy necessary for their continued operation. The devices are, of course, designed to require a minimum of electrical energy, so that extended operation from batteries may be possible. Lithium batteries and other primary, non-rechargeable cells may be used, but they are expensive and require replacement of surgical procedures. Nickel-cadmium and other rechargeable batteries are also available, but have limited charge-recharge characteristics, require long intervals for recharging, and release gas during the charging process.”

[0380] The solution to this problem is described, e.g., in claim 1 of the patent, which describes “An electric power supply for providing electrical energy to an electrically operated medical device comprising: capacitor means for accommodating an electric charge; first means providing a regulated source of unidirectional electrical energy; second means connecting said first means to said capacitor means for supplying charging current to said capacitor means at a first voltage which increases with charge in the capacitor means; third means deriving from said first means a comparison second voltage of constant magnitude; comparator means operative when said first voltage reaches a first value to reduce said first voltage to a second, lower value; and voltage regulator means connected to said capacitor means and medical device to limit the voltage supplied to the medical device.”

[0381] U.S. Pat. No. 4,416,283 discloses an implantable shunted coil telemetry transponder employed as a magnetic pulse transducer for receiving externally transmitted data; the entire disclosure of this United States patent is hereby incorporated by reference into this specification. This transponder may be used in a manner similar to that of the aforementioned telemetry system.

[0382] In particular, a programming system for a biomedical implant is described in claim 1 of U.S. Pat. No. 4,416,283. Such claim 1 discloses “In a programming system for a biomedical implant of the type wherein an external programmer produces a series of magnetic impulses which are received and transduced to form a corresponding electrical pulse input to programmable parameter data registers inside the implant, wherein the improvement comprises external programming pulse receiving and transducing circuitry in the implant including a tuned coil, means responsive to pairs of successive voltage spikes of opposite polarity magnetically induced across said tuned coil by said magnetic impulses for forming corresponding binary pulses duplicating said externally generated magnetic impulses giving rise to said spikes, and means for outputting said binary pulses to said data registers to accomplish programming of the implant.”

[0383] U.S. Pat. No. 4,871,351 discloses an implantable pump infusion system; the entire disclosure of this United States patent is hereby incorporated by reference into this specification. These implantable pumps are discussed in column 1 of the patent, wherein it is disclosed that: “Certain human disorders, such as diabetes, require the injection into the body of prescribed amounts of medication at prescribed times or in response to particular conditions or events. Various kinds of infusion pumps have been propounded for infusing drugs or other chemicals or solutions into the body at continuous rates or measured dosages. Examples of such known infusion pumps and dispensing devices are found in U.S. Pat. Nos. 3,731,861; 3,692,027; 3,923,060; 4,003,379; 3,951,147; 4,193,397; 4,221,219 and 4,258,711. Some of the known pumps are external and inject the drugs or other medication into the body via a catheter, but the preferred pumps are those which are fully implantable in the human body.” One may use the implantable pumps of this patent to delivery the anti-mitotic compound of this invention to a specified site and, thereafter, to “finely focus” such delivery by means of magnetic focusing means.

[0384] U.S. Pat. No. 4,871,351 also discloses that: “Implantable pumps have been used in infusion systems such as those disclosed in U.S. Pat. Nos. 4,077,405; 4,282,872; 4,270,532; 4,360,019 and 4,373,527. Such infusion systems are of the open loop type. That is, the systems are pre-programmed to deliver a desired rate of infusion. The rate of infusion may be programmed to vary with time and the particular patient. A major disadvantage of such open loop systems is that they are not responsive to the current condition of the patient, i.e. they do not have feedback information. Thus, an infusion system of the open loop type may continue dispensing medication according to its pre-programmed rate or profile when, in fact, it may not be needed.”

[0385] U.S. Pat. No. 4,871,351 also discloses that: “There are known closed loop infusion systems which are designed to control a particular condition of the body, e.g. the blood glucose concentration. Such systems use feedback control continuously, i.e. the patient's blood is withdrawn via an intravenous catheter and analysed continuously and a computer output signal is derived from the actual blood glucose concentration to drive a pump which infuses insulin at a rate corresponding to the signal. The known closed loop systems suffer from several disadvantages. First, since they monitor the blood glucose concentration continuously they are complex and relatively bulky systems external to the patient, and restrict the movement of the patient. Such systems are suitable only for hospital bedside applications for short periods of time and require highly trained operating staff. Further, some of the known closed loop systems do not allow for manually input overriding commands. Examples of closed loop systems are found in U.S. Pat. Nos. 4,055,175; 4,151,845 and 4,245,634.”

[0386] U.S. Pat. No. 4,871,351 also discloses that “An implanted closed loop system with some degree of external control is disclosed in U.S. Pat. No. 4,146,029. In that system, a sensor (either implanted or external) is arranged on the body to sense some kind of physiological, chemical, electrical or other condition at a particular site and produced data which corresponds to the sensed condition at the sensed site. This data is fed directly to an implanted microprocessor controlled medication dispensing device. A predetermined amount of medication is dispensed in response to the sensed condition according to a pre-programmed algorithm in the microprocessor control unit. An extra-corporeal coding pulse transmitter is provided for selecting between different algorithms in the microprocessor control unit. The system of U.S. Pat. No. 4,146,029 is suitable for use in treating only certain ailments such as cardiac conditions. It is unsuitable as a blood glucose control system for example, since (i) it is not practicable to measure the blood glucose concentration continuously with an implanted sensor and (ii) the known system is incapable of dispensing discrete doses of insulin in response to certain events, such as meals and exercise. Furthermore, there are several disadvantages to internal sensors; namely, due to drift, lack of regular calibration and limited life, internal sensors do not have high long-term reliability. If an external sensor is used with the system of U.S. Pat. No. 4,146,029, the output of the sensor must be fed through the patient's skin to the implanted mechanism. There are inherent disadvantages to such a system, namely the high risk of infection. Since the algorithms which control the rate of infusion are programmed into the implanted unit, it is not possible to upgrade these algorithms without surgery. The extra-corporeal controller merely selects a particular one of several medication programs but cannot actually alter a program.”

[0387] U.S. Pat. No. 4,871,351 also discloses that “It is an object of the present invention to overcome, or substantially ameliorate the above described disadvantages of the prior art by providing an implantable open loop medication infusion system with a feedback control option”

[0388] The solution to this problem is set forth in claim 1 of U.S. Pat. No. 4,871,351,which describes: “A medical infusion system intermittently switchable at selected times between an open loop system without feedback and a closed loop system with feedback, said system comprising an implantable unit including means for controllably dispensing medication into a body, an external controller, and an extra-corporeal sensor; wherein said implantable unit comprises an implantable transceiver means for communicating with a similar external transceiver means in said external controller to provide a telemetry link between said controller and said implantable unit, a first reservoir means for holding medication liquid, a liquid dispensing device, a pump connected between said reservoir means and said liquid dispensing device, and a first electronic control circuit means connected to said implantable transceiver means and to said pump to operate said pump; wherein said external controller comprises a second electronic control circuit means connected with said external transceiver means, a transducer means for reading said sensor, said transducer means having an output connected to said second electronic control circuit means, and a manually operable electric input device connected to said second electronic control circuit means; wherein said pump is operable by said first electronic control circuit means to pump said medication liquid from said first reservoir means to said liquid-dispensing device at a first predetermined rate independent of the output of said extra-corporeal sensor, and wherein said input device or said transducer means include means which selectively operable at intermittent times to respectively convey commands or output of said transducer representing the reading of said sensor to said second control circuit to instruct said first control circuit via said telemetry link to modify the operation of said pump.”

[0389] U.S. Pat. No. 4,941,461 describes an electrically actuated inflatable penile erection device comprised of an implantable induction coil and an implantable pump; the entire disclosure of this United States patent is hereby incorporated by reference into this specification. The device of this patent is described, e.g., in claim 1 of the patent, which discloses “An apparatus for achieving a penile erection in a human male, comprising: at least one elastomer cylinder having a root chamber and a pendulous chamber, said elastomer cylinder adapted to be placed in the corpus carvenosum of the penis; an external magnetic field generator which can be placed over some section of the penis which generates an alternating magnetic field; an induction coil contained within said elastomer cylinder which produces an alternating electric current when in the proximity of said alternating magnetic filed which is produced by said external magnetic field generator; and a fluid pumping means located within said elastomer cylinder, said pumping means being operated by the electrical power generated in said induction coil to pump fluid from said root chamber to said pendulous chamber in order to stiffen said elastomer cylinder for causing the erect state of the penis.”

[0390] U.S. Pat. No. 5,487,760 discloses an implantable signal transceiver disposed in an artificial heart valve; this transceiver may be used in the process of this invention in accordance with the aforementioned telemetry device; and the entire disclosure of this United States patent is hereby incorporated by reference into this specification. Claim 1 of this patent describes: “In combination, an artificial heart valve of the type having a tubular body member, defining a lumen and pivotally supporting at least one occluder, said body member having a sewing cuff covering an exterior surface of said body member; and an electronic sensor module disposed between said sewing cuff and said exterior surface, wherein said sensor module incorporates a sensor element for detecting movement of said at least one occluder between an open and a closed disposition relative to said lumen and wherein said sensor module further includes a signal transceiver coupled to said sensor element, and means for energizing said signal transceiver, and wherein said sensor module includes means for encapsulating said sensor element, signal transceiver and energizing means in a moisture-impervious container.”

[0391] As will be apparent to those skilled in the art, the sensor/transceiver combination may advantageously be used in conjunction with the anti-mitotic compound of this invention, and/or microtubules.

[0392] U.S. Pat. No. 5,702,430 discloses an implantable power supply; the entire disclosure of such patent is hereby incorporated by reference into this specification. This implantable power supply may be used to supply power to either the compound of this invention, the treatment site, and/or one or more other devices from which a specified energy output is desired.

[0393] Claim 1 of U.S. Pat. No. 5,702,430 describes: “A surgically implantable power supply comprising battery means for providing a source of power, charging means for charging the battery means, enclosure means isolating the battery means from the human body, gas holding means within the enclosure means for holding gas generated by the battery means during charging, seal means in the enclosure means arranged to rapture when the internal gas pressure exceeds a certain value and inflatable gas container means outside the enclosure means to receive gas from within the enclosure means when the seal means has been ruptured.”

[0394] Columns 1 through 5 of U.S. Pat. No. 5,702,430 presents an excellent discussion of “prior art” implantable pump assemblies that may be used, e.g., to deliver the anti-mitotic compound of this invention. As is disclosed in such portion of U.S. Pat. No. 5,702,430, “The most widely tested and commonly used implantable blood pumps employ variable forms of flexible sacks (also spelled sacs) or diaphragms which are squeezed and released in a cyclical manner to cause pulsatile ejection of blood. Such pumps are discussed in books or articles such as Hogness and Antwerp 1991, DeVries et al 1984, and Farrar et al 1988, and in U.S. Pat. No. 4,994,078 (Jarvik 1991), U.S. Pat. No. 4,704,120 (Slonina 1987), U.S. Pat. No. 4,936,758 (Coble 1990), and U.S. Pat. No. 4,969,864 (Schwarzmann et al 1990). Sack or diaphragm pumps are subject to fatigue failure of compliant elements and as such are mechanically and functionally quite different from the pump which is the subject of the present invention.”

[0395] U.S. Pat. No. 5,702,430 also discloses that “An entirely different class of implantable blood pumps uses rotary pumping mechanisms. Most rotary pumps can be classified into two categories: centrifugal pumps and axial pumps. Centrifugal pumps, which include pumps marketed by Sarns (a subsidiary of the 3M Company) and Biomedicus (a subsidiary of Medtronic, Eden Prairie, Minn.), direct blood into a chamber, against a spinning interior wall (which is a smooth disk in the Medtronic pump). A flow channel is provided so that the centrifugal force exerted on the blood generates flow.”

[0396] U.S. Pat. No. 5,702,430 also discloses that “By contrast, axial pumps provide blood flow along a cylindrical axis, which is in a straight (or nearly straight) line with the direction of the inflow and outflow. Depending on the pumping mechanism used inside an axial pump, this can in some cases reduce the shearing effects of the rapid acceleration and deceleration forces generated in centrifugal pumps. However, the mechanisms used by axial pumps can inflict other types of stress and damage on blood cells.”

[0397] U.S. Pat. No. 5,702,430 also discloses that “Some types of axial rotary pumps use impeller blades mounted on a center axle, which is mounted inside a tubular conduit. As the blade assembly spins, it functions like a fan, or an outboard motor propeller. As used herein, “impeller” refers to angled vanes (also called blades) which are constrained inside a flow conduit; an impeller imparts force to a fluid that flows through the conduit which encloses the impeller. By contrast, “propeller” usually refers to non-enclosed devices, which typically are used to propel vehicles such as boats or airplanes.”

[0398] “Another type of axial blood pump, called the “Haemopump” (sold by Nimbus) uses a screw-type impeller with a classic screw (also called an Archimedes screw; also called a helifoil, due to its helical shape and thin cross-section). Instead of using several relatively small vanes, the Haemopump screw-type impeller contains a single elongated helix, comparable to an auger used for drilling or digging holes. In screw-type axial pumps, the screw spins at very high speed (up to about 10,000 rpm). The entire Haemopump unit is usually less than a centimeter in diameter. The pump can be passed through a peripheral artery into the aorta, through the aortic valve, and into the left ventricle. It is powered by an external motor and drive unit.”

[0399] U.S. Pat. No. 5,702,430 also discloses that “Centrifugal or axial pumps are commonly used in three situations: (1) for brief support during cardio-pulmonary operations, (2) for short-term support while awaiting recovery of the heart from surgery, or (3) as a bridge to keep a patient alive while awaiting heart transplantation. However, rotary pumps generally are not well tolerated for any prolonged period. Patients who must rely on these units for a substantial length of time often suffer from strokes, renal (kidney) failure, and other organ dysfunction. This is due to the fact that rotary devices, which must operate at relatively high speeds, may impose unacceptably high levels of turbulent and laminar shear forces on blood cells. These forces can damage or lyse (break apart) red blood cells. A low blood count (anemia) may result, and the disgorged contents of lysed blood cells (which include large quantities of hemoglobin) can cause renal failure and lead to platelet activation that can cause embolisms and stroke.”

[0400] “One of the most important problems in axial rotary pumps in the prior art involves the gaps that exist between the outer edges of the blades, and the walls of the flow conduit. These gaps are the site of severe turbulence and shear stresses, due to two factors. Since implantable axial pumps operate at very high speed, the outer edges of the blades move extremely fast and generate high levels of shear and turbulence. In addition, the gap between the blades and the wall is usually kept as small as possible to increase pumping efficiency and to reduce the number of cells that become entrained in the gap area. This can lead to high-speed compression of blood cells as they are caught in a narrow gap between the stationary interior wall of the conduit and the rapidly moving tips or edges of the blades.”

[0401] U.S. Pat. No. 5,702,430 also discloses that “An important factor that needs to be considered in the design and use of implantable blood pumps is “residual cardiac function,” which is present in the overwhelming majority of patients who would be candidates for mechanical circulatory assistance. The patient's heart is still present and still beating, even though, in patients who need mechanical pumping assistance, its output is not adequate for the patient's needs. In many patients, residual cardiac functioning often approaches the level of adequacy required to support the body, as evidenced by the fact that the patient is still alive when implantation of an artificial pump must be considered and decided. If cardiac function drops to a level of severe inadequacy, death quickly becomes imminent, and the need for immediate intervention to avert death becomes acute.”

[0402] U.S. Pat. No. 5,702,430 also discloses that “Most conventional ventricular assist devices are designed to assume complete circulatory responsibilities for the ventricle they are “assisting. As such, there is no need, nor presumably any advantage, for the device to interact in harmony with the assisted ventricle. Typically, these devices utilize a “fill-to-empty” mode that, for the most part, results in emptying of the device in random association with native heart contraction. This type of interaction between the device and assisted ventricle ignores the fact that the overwhelming majority of patients who would be candidates for mechanical assistance have at least some significant residual cardiac function.”

[0403] U.S. Pat. No. 5,702,430 also discloses that “It is preferable to allow the natural heart, no matter how badly damaged or diseased it may be, to continue contributing to the required cardiac output whenever possible so that ventricular hemodynamics are disturbed as little as possible. This points away from the use of total cardiac replacements and suggests the use of “assist” devices whenever possible. However, the use of assist devices also poses a very difficult problem: in patients suffering from severe heart disease, temporary or intermittent crises often require artificial pumps to provide “bridging” support which is sufficient to entirely replace ventricular pumping capacity for limited periods of time, such as in the hours or days following a heart attack or cardiac arrest, or during periods of severe tachycardia or fibrillation.”

[0404] U.S. Pat. No. 5,702,430 also discloses that “Accordingly, an important goal during development of the described method of pump implantation and use and of the surgically implantable reciprocating pump was to design a method and a device which could cover a wide spectrum of requirements by providing two different and distinct functions. First, an ideal cardiac pumping device should be able to provide “total” or “complete” pumping support which can keep the patient alive for brief or even prolonged periods, if the patient's heart suffers from a period of total failure or severe inadequacy. Second, in addition to being able to provide total pumping support for the body during brief periods, the pump should also be able to provide a limited “assist” function. It should be able to interact with a beating heart in a cooperative manner, with minimal disruption of the blood flow generated by the natural heartbeat. If a ventricle is still functional and able to contribute to cardiac output, as is the case in the overwhelming majority of clinical applications, then the pump will assist or augment the residual cardiac output. This allows it to take advantage of the natural, non-hemolytic pumping action of the heart to the fullest extent possible; it minimizes red blood cell lysis, it reduces mechanical stress on the pump, and it allows longer pump life and longer battery life.”

[0405] “Several types of surgically implantable blood pumps containing a piston-like member have been developed to provide a mechanical device for augmenting or even totally replacing the blood pumping action of a damaged or diseased mammalian heart.”

[0406] “U.S. Pat. No. 3,842,440 to Karlson discloses an implantable linear motor prosthetic heart and control system containing a pump having a piston-like member which is reciprocal within a magnetic field. The piston-like member includes a compressible chamber in the prosthetic heart which communicates with the vein or aorta.”

[0407] U.S. Pat. No. 5,702,430 also discloses that “U.S. Pat. Nos. 3,911,897 and 3,911,898 to Leachman, Jr. disclose heart assist devices controlled in the normal mode of operation to copulsate and counterpulsate with the heart, respectively, and produce a blood flow waveform corresponding to the blood flow waveform of the heart being assisted. The heart assist device is a pump connected serially between the discharge of a heart ventricle and the vascular system. The pump may be connected to the aorta between the left ventricle discharge immediately adjacent the aortic valve and a ligation in the aorta a short distance from the discharge. This pump has coaxially aligned cylindrical inlet and discharge pumping chambers of the same diameter and a reciprocating piston in one chamber fixedly connected with a reciprocating piston of the other chamber. The piston pump further includes a passageway leading between the inlet and discharge chambers and a check valve in the passageway preventing flow from the discharge chamber into the inlet chamber. There is no flow through the movable element of the piston.”

[0408] U.S. Pat. No. 5,702,430 also discloses that “U.S. Pat. No. 4,102,610 to Taboada et al. discloses a magnetically operated constant volume reciprocating pump which can be used as a surgically implantable heart pump or assist. The reciprocating member is a piston carrying a tilting-disk type check valve positioned in a cylinder. While a tilting disk valve results in less turbulence and applied shear to surrounding fluid than a squeezed flexible sack or rotating impeller, the shear applied may still be sufficiently excessive so as to cause damage to red blood cells.”

[0409] U.S. Pat. No. 5,702,430 also discloses that “U.S. Pat. Nos. 4,210,409 and 4,375,941 to Child disclose a pump used to assist pumping action of the heart having a piston movable in a cylindrical casing in response to magnetic forces. A tilting-disk type check valve carried by the piston provides for flow of fluid into the cylindrical casing and restricts reverse flow. A plurality of longitudinal vanes integral with the inner wall of the cylindrical casing allow for limited reverse movement of blood around the piston which may result in compression and additional shearing of red blood cells. A second fixed valve is present in the inlet of the valve to prevent reversal of flow during piston reversal.”

[0410] U.S. Pat. No. 5,702,430 also discloses that “U.S. Pat. No. 4,965,864 to Roth discloses a linear motor using multiple coils and a reciprocating element containing permanent magnets which is driven by microprocessor-controlled power semiconductors. A plurality of permanent magnets is mounted on the reciprocating member. This design does not provide for self-synchronization of the linear motor in the event the stroke of the linear motor is greater than twice the pole pitch on the reciprocating element. During start-up of the motor, or if magnetic coupling is lost, the reciprocating element may slip from its synchronous position by any multiple of two times the pole pitch. As a result, a sensing arrangement must be included in the design to detect the position of the piston so that the controller will not drive it into one end of the closed cylinder. In addition, this design having equal pole pitch and slot pitch results in a “jumpy” motion of the reciprocating element along its stroke.”

[0411] U.S. Pat. No. 5,702,430 also discloses that “In addition to the piston position sensing arrangement discussed above, the Roth design may also include a temperature sensor and a pressure sensor as well as control circuitry responsive to the sensors to produce the intended piston motion. For applications such as implantable blood pumps where replacement of failed or malfunctioning sensors requires open heart surgery, it is unacceptable to have a linear motor drive and controller that relies on any such sensors. In addition, the Roth controller circuit uses only NPN transistors thereby restricting current flow to the motor windings to one direction only.’

[0412] ‘U.S. Pat. No. 4,541,787 to Delong describes a pump configuration wherein a piston containing a permanent magnet is driven in a reciprocating fashion along the length of a cylinder by energizing a sequence of coils positioned around the outside of the cylinder. However, the coil and control system configurations disclosed only allow current to flow through one individual winding at a time. This does not make effective use of the magnetic flux produced by each pole of the magnet in the piston. To maximize force applied to the piston in a given direction, current must flow in one direction in the coils surrounding the vicinity of the north pole of the permanent magnet while current flows in the opposite direction in the coils surrounding the vicinity of the south pole of the permanent magnet. Further, during starting of the pump disclosed by Delong, if the magnetic piston is not in the vicinity of the first coil energized, the sequence of coils that are subsequently energized will ultimately approach and repel the magnetic piston toward one end of the closed cylinder. Consequently, the piston must be driven into the end of the closed cylinder before the magnetic poles created by the external coils can become coupled with the poles of the magnetic piston in attraction.”

[0413] U.S. Pat. No. 5,702,430 also discloses that “U.S. Pat. No. 4,610,658 to Buchwald et al. discloses an implantable fluid displacement peritoneovenous shunt system. The system comprises a magnetically driven pump having a spool piston fitted with a disc flap valve.”

[0414] U.S. Pat. No. 5,702,430 also discloses that “U.S. Pat. No. 5,089,017 to Young et al. discloses a drive system for artificial hearts and left ventricular assist devices comprising one or more implantable pumps driven by external electromagnets. The pump utilizes working fluid, such as sulfur hexafluoride to apply pneumatic pressure to increase blood pressure and flow rate.”

[0415] U.S. Pat. No. 5,743,854 discloses a device for inducing and localizing epileptiform activity that is comprised of a direct current (DC) magnetic field generator, a DC power source, and sensors adapted to be coupled to a patient's head; this direct current magnetic field generator may be used in conjunction with the anti-mitotic compound of this invention and/or an auxiliary device and/or tubulin and/or microtubules. In one embodiment of the invention, described in claim 7, the sensors “ . . . comprise Foramen Ovale electrodes adapted to be implanted to sense evoked and natural epileptic firings.”

[0416] U.S. Pat. No. 5,803,897 discloses a penile prosthesis system comprised of an implantable pressurized chamber, a reservoir, a rotary pump, a magnetically responsive rotor, and a rotary magnetic field generator. Claim 1 of this patent describes: “A penile prosthesis system comprising: at least one pressurizable chamber including a fluid port, said chamber adapted to be located within the penis of a patient for tending to make the penis rigid in response to fluid pressure within said chamber; a fluid reservoir; a rotary pump adapted to be implanted within the body of a user, said rotary pump being coupled to said reservoir and to said chamber, said rotary pump including a magnetically responsive rotor adapted for rotation in the presence of a rotating magnetic field, and an impeller for tending to pump fluid at least from said reservoir to said chamber under the impetus of fluid pressure, to thereby pressurize said chamber in response to operation of said pump; and a rotary magnetic field generator for generating a rotating magnetic field, for, when placed adjacent to the skin of said user at a location near said rotary pump, rotating said magnetically responsive rotor in response to said rotating magnetic field, to thereby tend to pressurize said chamber and to render the penis rigid; controllable valve means operable in response to motion of said rotor of said rotary pump, for tending to prevent depressurization of said chamber when said rotating magnetic field no longer acts on said rotor, said controllable valve means comprising a unidirectional check valve located in the fluid path extending between said rotary pump and said port of said chamber.” Such fluid pumping means may be used to facilitate the delivery of the anti-mitotic compound of this invention.

[0417] U.S. Pat. No. 5,810,015 describes an implantable power supply that can convert non-electrical energy (such as mechanical, chemical, thermal, or nuclear energy) into electrical energy; the entire disclosure of this United States patent is hereby incorporated by reference into this specification. This power supply may be used to supply energy to the anti-mitotic compound of this invention and/or to tubulin and/or to microtubules.

[0418] In column 1 of U.S. Pat. No. 5,810,015, a discussion of “prior art” rechargeable power supplies is presented. It is disclosed in this column 1 that: “Modern medical science employs numerous electrically powered devices which are implanted in a living body. For example, such devices may be employed to deliver medications, to support blood circulation as in a cardiac pacemaker or artificial heart, and the like. Many implantable devices contain batteries which may be rechargeable by transcutaneous induction of electromagnetic fields in implanted coils connected to the batteries. Transcutaneous inductive recharging of batteries in implanted devices is disclosed for example in U.S. Pat. Nos. 3,923,060; 4,082,097; 4,143,661; 4,665,896; 5,279,292; 5,314,453; 5,372,605, and many others.”

[0419] U.S. Pat. No. 5,810,015 also discloses that: “Other methods for recharging implanted batteries have also been attempted. For example, U.S. Pat. No. 4,432,363 discloses use of light or heat to power a solar battery within an implanted device. U.S. Pat. No. 4,661,107 discloses recharging of a pacemaker battery using mechanical energy created by motion of an implanted heart valve.” These “other methods” may also be used in the process of this invention.

[0420] U.S. Pat. No. 5,810,015 also discloses that: “A number of implanted devices have been powered without batteries. U.S. Pat. Nos. 3,486,506 and 3,554,199 disclose generation of electric pulses in an implanted device by movement of a rotor in response to the patient's heartbeat. U.S. Pat. No. 3,563,245 discloses a miniaturized power supply unit which employs mechanical energy of heart muscle contractions to generate electrical energy for a pacemaker. U.S. Pat. No. 3,456,134 discloses a piezoelectric converter for electronic implants in which a piezoelectric crystal is in the form of a weighted cantilever beam capable of responding to body movement to generate electric pulses. U.S. Pat. No. 3,659,615 also discloses a piezoelectric converter which reacts to muscular movement in the area of implantation. U.S. Pat. No. 4,453,537 discloses a pressure actuated artificial heart powered by a second implanted device attached to a body muscle which in turn is stimulated by an electric signal generated by a pacemaker.” These “other devices” may also be used in the process of this invention.

[0421] U.S. Pat. No. 5,810,015 also discloses that: “In spite of all these efforts, a need remains for efficient generation of energy to supply electrically powered implanted devices.” The solution provided by U.S. Pat. No. 5,80,015 is described in claim 1 thereof, which describes: “An implantable power supply apparatus for supplying electrical energy to an electrically powered device, comprising: a power supply unit including: a transcutaneously, invasively rechargeable non-electrical energy storage device (NESD); an electrical energy storage device (EESD); and an energy converter coupling said NESD and said EESD, said converter including means for converting non-electrical energy stored in said NESD to electrical energy and for transferring said electrical energy to said EESD, thereby storing said electrical energy in said EESD.”

[0422] An implantable ultrasound communication system is disclosed in U.S. Pat. No. 5,861,018, the entire disclosure of which is hereby incorporated by reference into this specification. As is disclosed in the abstract of this patent, there is disclosed in such patent “A system for communicating through the skin of a patient, the system including an internal communication device implanted inside the body of a patient and an external communication device. The external communication device includes an external transmitter which transmits a carrier signal into the body of the patient during communication from the internal communication device to the external communication device. The internal communication device includes an internal modulator which modulates the carrier signal with information by selectively reflecting the carrier signal or not reflecting the carrier signal. The external communication device demodulates the carrier signal by detecting when the carrier signal is reflected and when the carrier signal is not reflected through the skin of the patient. When the reflected carrier signal is detected, it is interpreted as data of a first state, and when the reelected carrier signal is not detected, it is interpreted as data of a second state. Accordingly, the internal communication device consumes relatively little power because the carrier signal used to carry the information is derived from the external communication device. Further, transfer of data is also very efficient because the period needed to modulate information of either the first state or the second state onto the carrier signal is the same. In one embodiment, the carrier signal operates in the ultrasound frequency range.”

[0423] U.S. Pat. No. 5,861,019, the entire disclosure of which is hereby incorporated by reference into this specification, discloses a telemetry system for communications between an external programmer and an implantable medical device. Claim 1 of this patent describes: “A telemetry system for communications between an external programmer and an implantable medical device, comprising: the external programmer comprising an external telemetry antenna and an external transceiver for receiving uplink telemetry transmissions and transmitting downlink telemetry transmission through the external telemetry antenna; the implantable medical device comprising an implantable medical device housing, an implantable telemetry antenna and an implantable transceiver for receiving downlink transmissions and for transmitting uplink telemetry transmission through the implantable telemetry antenna, the implantable medical device housing being formed of a conductive metal and having an exterior housing surface and an interior housing surface; the implantable medical device housing being formed with a housing recess extending inwardly from the exterior housing surface to a predetermined housing recess depth in the predetermined substrate area of the exterior housing surface for receiving the dielectric substrate therein; wherein the implantable telemetry antenna is a conformal microstrip antenna formed as part of the implantable medical device housing, the microstrip antenna having electrically conductive ground plane and radiator patch layers separated by a dielectric substrate, layer the conductive radiator patch layer having a predetermined thickness and predetermined radiator patch layer dimensions, the patch layer being formed upon one side of the dielectric substrate layer.”

[0424] “An extensive description of the historical development of uplink and downlink telemetry transmission formats” is set forth at columns 2 through 5 of U.S. Pat. No. 5,861,019; such telemetry transmission formats may be used in conjunction with the anti-mitotic compound of this invention. As is disclosed in these columns: “An extensive description of the historical development of uplink and downlink telemetry transmission formats and is set forth in the above-referenced '851 and '963 applications and in the following series of commonly assigned patents all of which are incorporated herein by reference in their entireties. Commonly assigned U.S. Pat. No. 5,127,404 to Grevious et al. sets forth an improved method of frame based, pulse position modulated (PPM) of data particularly for uplink telemetry. The frame-based PPM telemetry format increases bandwidth well above simple PIM or pulse width modulation (PWM) binary bit stream transmissions and thereby conserves energy of the implanted medical device. Commonly assigned U.S. Pat. No. 5,168,871 to Grevious et al. sets forth an improvement in the telemetry system of the '404 patent for detecting uplink telemetry RF pulse bursts that are corrupted in a noisy environment. Commonly assigned U.S. Pat. No. 5,292,343 to Blanchette et al. sets forth a further improvement in the telemetry system of the '404 patent employing a hand shake protocol for maintaining the communications link between the external programmer and the implanted medical device despite instability in holding the programmer RF head steady during the transmission. Commonly assigned U.S. Pat. No. 5,324,315 to Grevious sets forth an improvement in the uplink telemetry system of the '404 patent for providing feedback to the programmer to aid in optimally positioning the programmer RF head over the implanted medical device. Commonly assigned U.S. Pat. No. 5,117,825 to Grevious sets forth a further improvement in the programmer RF head for regulating the output level of the magnetic H field of the RF head telemetry antenna using a signal induced in a sense coil in a feedback loop to control gain of an amplifier driving the RF head telemetry antenna. Commonly assigned U.S. Pat. No. 5,562,714 to Grevious sets forth a further solution to the regulation of the output level of the magnetic H field generated by the RF head telemetry antenna using the sense coil current to directly load the H field. Commonly assigned U.S. Pat. No. 5,354,319 to Wybomey et al. sets forth a number of further improvements in the frame based telemetry system of the '404 patent. Many of these improvements are incorporated into MEDTRONIC® Model 9760, 9766 and 9790 programmers. These improvements and the improvements described in the above-referenced pending patent applications are directed in general to increasing the data transmission rate, decreasing current consumption of the battery power source of the implantable medical device, and increasing reliability of uplink and downlink telemetry transmissions.”

[0425] U.S. Pat. No. 5,810,015 also discloses that: “The current MEDTRONIC® telemetry system employing the 175 kHz carrier frequency limits the upper data transfer rate, depending on bandwidth and the prevailing signal-to-noise ratio. Using a ferrite core, wire coil, RF telemetry antenna results in: (1) a very low radiation efficiency because of feed impedance mismatch and ohmic losses; 2) a radiation intensity attenuated proportionally to at least the fourth power of distance (in contrast to other radiation systems which have radiation intensity attenuated proportionally to square of distance); and 3) good noise immunity because of the required close distance between and coupling of the receiver and transmitter RF telemetry antenna fields.”

[0426] U.S. Pat. No. 5,810,015 also discloses that “These characteristics require that the implantable medical device be implanted just under the patient's skin and preferably oriented with the RF telemetry antenna closest to the patient's skin. To ensure that the data transfer is reliable, it is necessary for the patient to remain still and for the medical professional to steadily hold the RF programmer head against the patient's skin over the implanted medical device for the duration of the transmission. If the telemetry transmission takes a relatively long number of seconds, there is a chance that the programmer head will not be held steady. If the uplink telemetry transmission link is interrupted by a gross movement, it is necessary to restart and repeat the uplink telemetry transmission. Many of the above-incorporated, commonly assigned, patents address these problems.”

[0427] U.S. Pat. No. 5,810,015 also discloses that “The ferrite core, wire coil, RF telemetry antenna is not bio-compatible, and therefore it must be placed inside the medical device hermetically sealed housing. The typically conductive medical device housing adversely attenuates the radiated RF field and limits the data transfer distance between the programmer head and the implanted medical device RF telemetry antennas to a few inches.”

[0428] U.S. Pat. No. 5,810,015 also discloses that “In U.S. Pat. No. 4,785,827 to Fischer, 4,991,582 to Byers et al., and commonly assigned 5,470,345 to Hassler et al. (all incorporated herein by reference in their entireties), the metal can typically used as the hermetically sealed housing of the implantable medical device is replaced by a hermetically sealed ceramic container. The wire coil antenna is still placed inside the container, but the magnetic H field is less attenuated. It is still necessary to maintain the implanted medical device and the external programming head in relatively close proximity to ensure that the H field coupling is maintained between the respective RF telemetry antennas.”

[0429] U.S. Pat. No. 5,810,015 also discloses that: “Attempts have been made to replace the ferrite core, wire coil, RF telemetry antenna in the implantable medical device with an antenna that can be located outside the hermetically sealed enclosure. For example, a relatively large air core RF telemetry antenna has been embedded into the thermoplastic header material of the MEDTRONIC® Prometheus programmable IPG. It is also suggested that the RF telemetry antenna may be located in the IPG header in U.S. Pat. No. 5,342,408. The header area and volume is relatively limited, and body fluid may infiltrate the header material and the RF telemetry antenna.”

[0430] U.S. Pat. No. 5,810,015 also discloses that: “In U.S. Pat. Nos. 5,058,581 and 5,562,713 to Silvian, incorporated herein by reference in their entireties, it is proposed that the elongated wire conductor of one or more medical lead extending away from the implanted medical device be employed as an RF telemetry antenna. In the particular examples, the medical lead is a cardiac lead particularly used to deliver energy to the heart generated by a pulse generator circuit and to conduct electrical heart signals to a sense amplifier. A modest increase in the data transmission rate to about 8 Kb/s is alleged in the '581 and '713 patents using an RF frequency of 10-300 MHz. In these cases, the conductor wire of the medical lead can operate as a far field radiator to a more remotely located programmer RF telemetry antenna. Consequently, it is not necessary to maintain a close spacing between the programmer RF telemetry antenna and the implanted cardiac lead antenna or for the patient to stay as still as possible during the telemetry transmission.”

[0431] U.S. Pat. No. 5,810,015 also discloses that: “However, using the medical lead conductor as the RF telemetry antenna has several disadvantages. The radiating field is maintained by current flowing in the lead conductor, and the use of the medical lead conductor during the RF telemetry transmission may conflict with sensing and stimulation operations. RF radiation losses are high because the human body medium is lossy at higher RF frequencies. The elongated lead wire RF telemetry antenna has directional radiation nulls that depend on the direction that the medical lead extends, which varies from patient to patient. These considerations both contribute to the requirement that uplink telemetry transmission energy be set artificially high to ensure that the radiated RF energy during the RF uplink telemetry can be detected at the programmer RF telemetry antenna. Moreover, not all implantable medical devices have lead conductor wires extending from the device.”

[0432] U.S. Pat. No. 5,810,015 also discloses that: “A further U.S. Pat. No. 4,681,111 to Silvian, incorporated herein by reference in its entirety, suggests the use of a stub antenna associated with the header as the implantable medical device RF telemetry antenna for high carrier frequencies of up to 200 MHz and employing phase shift keying (PSK) modulation. The elimination of the need for a VCO and a bit rate on the order of 2-5% of the carrier frequency or 3.3-10 times the conventional bit rate are alleged.”

[0433] U.S. Pat. No. 5,810,015 also discloses that: “At present, a wide variety of implanted medical devices are commercially released or proposed for clinical implantation. Such medical devices include implantable cardiac pacemakers as well as implantable cardioverter-defibrillators, pacemaker-cardioverter-defibrillators, drug delivery pumps, cardiomyostimulators, cardiac and other physiologic monitors, nerve and muscle stimulators, deep brain stimulators, cochlear implants, artificial hearts, etc. As the technology advances, implantable medical devices become ever more complex in possible programmable operating modes, menus of available operating parameters, and capabilities of monitoring increasing varieties of physiologic conditions and electrical signals which place ever increasing demands on the programming system.”

[0434] U.S. Pat. No. 5,810,015 also discloses that: “It remains desirable to minimize the time spent in uplink telemetry and downlink transmissions both to reduce the likelihood that the telemetry link may be broken and to reduce current consumption.”

[0435] “Moreover, it is desirable to eliminate the need to hold the programmer RF telemetry antenna still and in proximity with the implantable medical device RF telemetry antenna for the duration of the telemetry transmission. As will become apparent from the following, the present invention satisfies these needs.”

[0436] The solution to this problem is presented, e.g., in claim 1 of U.S. Pat. No. 5,861,019. This claim describes “A telemetry system for communications between an external programmer and an implantable medical device, comprising: the external programmer comprising an external telemetry antenna and an external transceiver for receiving uplink telemetry transmissions and transmitting downlink telemetry transmission through the external telemetry antenna; the implantable medical device comprising an implantable medical device housing, an implantable telemetry antenna and an implantable transceiver for receiving downlink transmissions and for transmitting uplink telemetry transmission through the implantable telemetry antenna, the implantable medical device housing being formed of a conductive metal and having an exterior housing surface and an interior housing surface; the implantable medical device housing being formed with a housing recess extending inwardly from the exterior housing surface to a predetermined housing recess depth in the predetermined substrate area of the exterior housing surface for receiving the dielectric substrate therein; wherein the implantable telemetry antenna is a conformal microstrip antenna formed as part of the implantable medical device housing, the microstrip antenna having electrically conductive ground plane and radiator patch layers separated by a dielectric substrate, layer the conductive radiator patch layer having a predetermined thickness and predetermined radiator patch layer dimensions, the patch layer being formed upon one side of the dielectric substrate layer.”

[0437] U.S. Pat. No. 5,945,762, the entire disclosure of which is hereby incorporated by reference into this specification, discloses an external transmitter adapted to magnetically excite an implanted receiver coil; such an implanted receiver coil may be disposed near, e.g., the anti-mitotic compound of this invention and/or other devices and/or tubulin and/or microtubules. Claim 1 of this patent describes “An external transmitter adapted for magnetically exciting an implanted receiver coil, causing an electrical current to flow in the implanted receiver coil, comprising: (a) a support; (b) a magnetic field generator that is mounted to the support; and (c) a prime mover that is drivingly coupled to an element of the magnetic field generator to cause said element of the magnetic field generator to reciprocate, in a reciprocal motion, said reciprocal motion of said element of the magnetic field generator producing a varying magnetic field that is adapted to induce an electrical current to flow in the implanted receiver coil.”

[0438] U.S. Pat. No. 5,954,758, the entire disclosure of which is hereby incorporated by reference into this specification, claims an implantable electrical stimulator comprised of an implantable radio frequency receiving coil, an implantable power supply, an implantable input signal generator, an implantable decoder, and an implantable electrical stimulator. Claim 1 of this patent describes “A system for transcutaneously telemetering position signals out of a human body and for controlling a functional electrical stimulator implanted in said human body, said system comprising: an implantable radio frequency receiving coil for receiving a transcutaneous radio frequency signal; an implantable power supply connected to said radio frequency receiving coil, said power supply converting received transcutaneous radio frequency signals into electromotive power; an implantable input signal generator electrically powered by said implantable power supply for generating at least one analog input movement signal to indicate voluntary bodily movement along an axis; an implantable encoder having an input operatively connected with said implantable input signal generator for encoding said movement signal into output data in a preselected data format; an impedance altering means connected with said encoder and said implantable radio frequency signal receiving coil to selectively change an impedance of said implantable radio frequency signal receiving coil; an external radio frequency signal transmit coil inductively coupled with said implantable radio frequency signal receiving coil, such that impedance changes in said implantable radio frequency signal receiving coil are sensed by said external radio frequency signal transmit coil to establish a sensed modulated movement signal in said external transmit coil; an external control system electrically connected to said external radio frequency transmit coil for monitoring said sensed modulated movement signal in said external radio frequency transmit coil, said external control system including: a demodulator for recovering the output data of said encoder from the sensed modulated movement signal of said external transmit coil, a pulse width algorithm means for applying a preselected pulse width algorithm to the recovered output data to derive a first pulse width, an amplitude algorithm means for applying an amplitude algorithm to the recovered output data to derive a first amplitude therefrom, an interpulse interval algorithm means for applying an interpulse algorithm to the recovered output data to derive a first interpulse interval therefrom; and, a stimulation pulse train signal generator for generating a stimulus pulse train signal which has the first pulse width and the first pulse amplitude; an implantable functional electrical stimulator for receiving said stimulation pulse train signal from said stimulation pulse train signal generator and generating stimulation pulses with the first pulse width, the first pulse amplitude, and separated by the first interpulse interval; and, at least one electrode operatively connected with the functional electrical stimulator for applying said stimulation pulses to muscle tissue of said human body.”

[0439] U.S. Pat. No. 6,006,133, the entire disclosure of which is hereby incorporated by reference into this specification, describes an implantable medical device comprised of a hermetically sealed housing.” Such a hermetically sealed housing may be used to contain, e.g., the anti-mitotic compound of this invention.

[0440] U.S. Pat. No. 6,083,166, the entire disclosure of which is hereby incorporated by reference into this specification, discloses an ultrasound transmitter for use with a surgical device. This ultrasound transmitter may be used, e.g., to affect the anti-mitotic compound of this invention and/or tubulin and/or microtubules.

[0441] U.S. Pat. No. 6,152,882, the entire disclosure of which is hereby incorporated by reference into this specification, discloses an implantable electroporation unit, an implantable probe electrode, an implantable reference electrode, and an amplifier unit; this electroporation unit may be used to treat, e.g., cancer cells in conjunction with the anti-mitotic compound of this invention. Claim 35 of this patent describes: “Apparatus for measurement of monophasic action potentials from an excitable tissue including a plurality of cells, the apparatus comprising: at least one probe electrode placeable adjacent to or in contact with a portion of said excitable tissue; at least one reference electrode placeable proximate said at least one probe electrode; an electroporating unit electrically connected to said at least one probe electrode and said at least one reference electrode for controllably applying to at least some of said cells subjacent said at least one probe electrode electrical current pulses suitable for causing electroporation of cell membranes of said at least some of said cells; and an amplifier unit electrically connected to said at least one probe electrode and to said at least one reference electrode for providing an output signal representing the potential difference between said probe electrode and said reference electrode”

[0442] U.S. Pat. No. 6,169,925, the entire disclosure of which is hereby incorporated by reference into this specification, describes a transceiver for use in communication with an implantable medical device. Claim 1 of this patent describes: “An external device for use in communication with an implantable medical device, comprising: a device controller; a housing; an antenna array mounted to the housing; an RF transceiver operating at defined frequency, coupled to the antenna array; means for encoding signals to be transmitted to the implantable device, coupled to an input of the transceiver; means for decoding signals received from the implantable device, coupled to an output of the transceiver; and means for displaying the decoded signals received from the implantable device; wherein the antenna array comprises two antennas spaced a fraction of the wavelength of the defined frequency from one another, each antenna comprising two antenna elements mounted to the housing and located orthogonal to one another; and wherein the device controller includes means for selecting which of the two antennas is coupled to the transceiver.” Such a transceiver, in combination with an implantable sensor, may be used in conjunction with the anti-mitotic compound of this invention and/or tubulin and/or microtubules and/or one or more other implanted devices.

[0443] U.S. Pat. No. 6,185,452, the entire disclosure of which is hereby incorporated by reference into this specification, claims a device for stimulating internal tissue, wherein such device is comprised of: “a sealed elongate housing configured for implantation in said patient's body, said housing having an axial dimension of less than 60 mm and a lateral dimension of less than 6 mm; power consuming circuitry carried by said housing including at least one electrode extending externally of said housing, said power consuming circuitry including a capacitor and pulse control circuitry for controlling (1) the charging of said capacitor and (2) the discharging of said capacitor to produce a current pulse through said electrode; a battery disposed in said housing electrically connected to said power consuming circuitry for powering said pulse control circuitry and charging said capacitor, said battery having a capacity of at least one microwatt-hour; an internal coil and a charging circuit disposed in said housing for supplying a charging current to said battery; an external coil adapted to be mounted outside of said patient's body; and means for energizing said external coil to generate an alternating magnetic field for supplying energy to said charging circuit via said internal coil.” Such capacitative discharge energy may be used to affect either the anti-mitotic compound of this invention and/or tubulin and/or microtubules.

[0444] U.S. Pat. No. 6,235,024, the entire disclosure of which is hereby incorporated by reference into this specification, discloses an implantable high frequency energy generator; such high-frequency energy may be used to affect either the anti-mitotic compound of this invention, tubulin, microtubules, and/or one or more other implanted devices. Claim 1 of this patent describes: “A catheter system comprising: an elongate catheter tubing having a distal section, a distal end, a proximal end, and at least one lumen extending between the distal end and the proximal end; a handle attached to the proximal end of said elongate catheter tubing, wherein the handle has a cavity; an ablation element mounted at the distal section of the elongate catheter tubing, the ablation element having a wall with an outer surface and an inner surface, wherein the outer surface is covered with an outer member made of a first electrically conductive material and the inner surface is covered with an inner member made of a second electrically conductive material, and wherein the wall comprises an ultrasound transducer; an electrical conducting means having a first and a second electrical wires, wherein the first electrical wire is coupled to the outer member and the second electrical wire is coupled to the inner member of the ablation element; and a high frequency energy generator means for providing a radiofrequency energy to the ablation element through a first electrical wire of the electrical conducting means.”

[0445] An implantable light-generating apparatus is described in claim 16 of U.S. Pat. No. 6,363,279, the entire disclosure of which is hereby incorporated by reference into this specification. In one embodiment, the compound of this invention is comprised of a photolytic linker which is caused to disassociate upon being exposed to specified light energy. As is disclosed in such claim 16, this patent provides a “Heart control apparatus, comprising circuitry for generating a non-excitatory stimulus, and stimulus application devices for applying to a heart or to a portion thereof said non-excitatory stimulus, wherein the circuitry for generating a non-excitatory stimulus generates a stimulus which is unable to generate a propagating action potential and wherein said circuitry comprises a light-generating apparatus for generating light.”

[0446] An implantable ultrasound probe is described in claim 1 of U.S. Pat. No. 6,421,565, the entire disclosure of which is hereby incorporated by reference into this specification. Such ultrasound may be used, e.g., to treat the microtubules of cancer cells; and this treatment may be combined, e.g., with the anti-mitotic compounds of this invention.

[0447] Claim 1 of U.S. Pat. No. 6,421,565 describes: “An implantable cardiac monitoring device comprising: an A-mode ultrasound probe adapted for implantation in a right ventricle of a heart, said ultrasound probe emitting an ultrasound signal and receiving at least one echo of said ultrasound signal from at least one cardiac segment of the left ventricle; a unit connected to said ultrasound probe for identifying a time difference between emission of said ultrasound signal and reception of said echo and, from said time difference, determining a position of said cardiac segment, said cardiac segment having a position which, at least when reflecting said ultrasound signal, is correlated to cardiac performance, and said unit deriving an indication of said cardiac performance from said position of said cardiac segment.”

[0448] An implantable stent that contains a tube and several optical emitters located on the inner surface of the tube is disclosed in U.S. Pat. No. 6,488,704, the entire disclosure of which is hereby incorporated by reference into this specification. One may use one or more of the implantable devices described in U.S. Pat. No. 6,488,704 together with the anti-mitotic compound of this invention and/or tubulin and/or microtubules and/or another in vivo device.

[0449] Claim 1 of U.S. Pat. No. 6,488,704 describes “1. An implantable stent which comprises: (a) a tube comprising an inner surface and an outer surface, and (b) a multiplicity of optical radiation emitting means adapted to emit radiation with a wavelength from about 30 nanometers to about 30 millimeters, and a multiplicity of optical radiation detecting means adapted to detect radiation with a wavelength of from about 30 nanometers to about 30 millimeters, wherein said optical radiation emitting means and said optical radiation detecting means are disposed on the inside surface of said tube.”

[0450] Many other implantable devices and configurations are described in the claims of U.S. Pat. No. 6,488,704. These devices and configurations may be used in conjunction with the anti-mitotic compound of this invention, and/or tubulin, and/or microtubules, and/or other auxiliary, implanted device.

[0451] Thus, e.g., claim 2 of U.S. Pat. No. 6,488,704 discloses that the “ . . . implantable stent is comprised of a flexible casing with an inner surface and an outer surface.” Claim 3 of such patent discloses that the case may be “ . . . comprised of fluoropolymer.” Claim 4 of such patent discloses that the casing may be “ . . . optically impermeable.”

[0452] Thus, e.g., claim 10 of U.S. Pat. No. 6,488,704 discloses an embodiment in which an implantable stent contains “ . . . telemetry means for transmitting a signal to a receiver located external to said implantable stent.” The telemetry means may be adapted to receive “ . . . a signal from a transmitter located external to said implantable stent (see claim 11); and such signal may be a radio-frequency signal (see claims 12 and 13). The implantable stent may also comprise “ . . . telemetry means for transmitting a signal to a receiver located external to said implantable stent” (see claim 22), and/or “ . . . telemetry means for receiving a signal from a transmitter located external to said implantable stent” (see claim 23), and/or “ . . . a controller operatively connected to said means for transmitting a signal to said receiver, and operatively connected to said means for receiving a signal from said transmitter” (see claim 24).

[0453] Thus, e.g., claim 14 of U.S. Pat. No. 6,488,704 describes an implantable stent that contains a waveguide array. The waveguide array may contain “ . . . a flexible optical waveguide device” (see claim 15), and/or “ . . . means for transmitting optical energy in a specified configuration” (see claim 16), and/or “ . . . a waveguide interface for receiving said optical energy transmitted in said specified configuration by said waveguide array” (see claim 17), and/or “ . . . means for filtering specified optical frequencies” (see claim 18). The implantable stent may be comprised of “ . . . means for receiving optical energy from said waveguide array” (see claim 19), and/or “ . . . means for processing said optical energy received from waveguide array” (see claim 20). The implantable stent may comprise “ . . . means for processing said radiation emitted by said optical radiation emitting means adapted with a wavelength from about 30 nanometers to about 30 millimeters” (see claim 21).

[0454] The implantable stent of U.S. Pat. No. 6,488,404 may be comprised of implantable laser devices. Thus, e.g., and referring again to U.S. Pat. No. 6,488,704, the implantable stent may be comprised of “ . . . a multiplicity of vertical cavity surface emitting lasers and photodetectors arranged in a monolithic configuration” (see claim 27), wherein “ . . . said monolithic configuration further comprises a multiplicity of optical drivers operatively connected to said vertical cavity surface emitting lasers” (see claim 28) and/or wherein “ . . . said vertical cavity surface emitting lasers each comprise a multiplicity of distributed Bragg reflector layers” (see claim 29), and/or wherein “ . . . each of said photodetectors comprises a multiplicity of distributed Bragg reflector layers” (see claim 30), and/or wherein “ . . . each of said vertical cavity surface emitting lasers is comprised of an emission layer disposed between a first distributed Bragg reflector layer and a second distributed Bragg reflector layer” (see claim 31), and/or wherein “ . . . said emission layer is comprised of a multiplicity of quantum well structures” (see claim 32), and/or wherein “ . . . each of said photodetectors is comprised of an absorption layer disposed between a first distributed Bragg reflector layer and a second distributed Bragg reflector layer” (see claim 33), and/or wherein “ . . . each of said vertical cavity surface emitting lasers and photodetectors is disposed on a separate semiconductor substrate” (see claim 34), and/or wherein “ . . . said semiconductor substrate comprises gallium arsenide.” These devices may advantageously be used in the process of this invention.

[0455] Referring again to U.S. Pat. No. 6,488,704, the entire disclosure of which is hereby incorporated by reference into this specification, the implantable stent may be comprised of an arithmetic unit (see claim 37 of such patent), and such arithmetic unit may be “ . . . comprised of means for receiving signals from said optical radiation detecting means” (see claim 38), and/or “ . . . means for calculating the concentration of components in an analyte disposed within said implantable stent (see claim 39). In one embodiment, “said means for calculating the concentration of components in said analyte calculates concentrations of said components in said analyte based upon optimum optical path lengths for different wavelengths and values of transmitted light (see claim 40).

[0456] Referring again to U.S. Pat. No. 6,488,704, the implantable stent may contain a power supply (see claim 41 thereof) which may contain a battery (see claim 42) which, in one embodiment, is a lithium-iodine battery (see claim 43).

[0457] U.S. Pat. No. 6,585,763, the entire disclosure of which is hereby incorporated by reference into this specification, describes in its claim 1 “ . . . a vascular graft comprising: a biocompatible material formed into a shape having a longitudinal axis to enclose a lumen disposed along said longitudinal axis of said shape, said lumen positioned to convey fluid through said vascular graft; a first transducer coupled to a wall of said vascular graft; and an implantable circuit for receiving electromagnetic signals, said implantable circuit coupled to said first transducer, said first transducer configured to receive a first energy from said circuit to emit a second energy having one or more frequencies and power levels to alter said biological activity of said medication in said localized area of said body subsequent to implantation of said first transducer in said body near said localized area.” One may use the means for “ . . . altering said biological activity of said medication . . . ” in the process of this invention. The transducer may be selected from the group consisting of “ . . . an ultrasonic transducer, a plurality of light sources, an electric field transducer, an electromagnetic transducer, and a resistive heating transducer” (see claim 2), it may comprise a coil (see claim 3), it may comprise “ . . . a regular solid including piezoelectric material, and wherein a first resonance frequency, being of said one or more frequencies, is determined by a first dimension of said regular solid and a second resonance frequency, being of said one or more frequencies, is determined by a second dimension of said regular solid and further including a first electrode coupled to said regular solid and a second electrode coupled to said regular solid” (see claim 4).

[0458] U.S. Pat. No. 6,605,089, the entire disclosure of which is hereby incorporated by reference into this specification, discloses an implantable bone growth promoting device. Claim 1 of this patent describes “A device for placement into and between at least two adjacent bone masses to promote bone growth therebetween, said device comprising: an implant having opposed first and second surfaces for placement between and-in contact with the adjacent bone masses, a mid-longitudinal axis, and a hollow chamber between said first and second surfaces, said hollow chamber being adapted to hold bone growth promoting material, said hollow chamber being along at least a portion of the mid-longitudinal axis of said implant, each of said first and second surfaces having at least one opening in communication with said hollow chamber into which bone from the adjacent bone masses grows; and an energizer for energizing said implant, said energizer being sized and configured to promote bone growth from adjacent bone mass to adjacent bone mass through said first and second surfaces and through at least a portion of said hollow chamber at the mid-longitudinal axis.” The implant may have a coil wrapped around it (see claim 6), a portion of the coil may be “ . . . in the form of an external thread on at least a portion of said first and second surfaces of said implant” (see claim 7), the “external thread” may be energized by the “energizer” (claim 8) by conducting “ . . . electromagnetic energy to said interior space . . . ” of the energizer (claim 9). One may use such “energizer” in the process of this invention.

[0459] Referring again to U.S. Pat. No. 6,605,089, and to the implant claimed therein, the implant may contain “ . . . a power supply delivering an electric charge” (see claim 14), and it may comprise “ . . . a first portion that is electrically conductive for delivering said electrical charge to at least a portion of the adjacent bone masses and said energizer delivers negative electrical charge to said first portion of said implant” (see claim 15). Additionally, the implant may also contain “ . . . a controller for controlling the delivery of said electric charge” that is disposed within the implant (see claim 18), that “ . . . includes one of a wave form generator and a voltage generator” (see claim 19), and that “ . . . provides for the delivery of one of an alternating current, a direct current, and a sinusoidal current” (see claim 21).

[0460] U.S. Pat. No. 6,641,520, the entire disclosure of which is hereby incorporated by reference into this specification, discloses a magnetic field generator for providing a static or direct current magnetic field generator; the magnetic field generator described in this patent may be used in conjunction the anti-mitotic compound and/or tubulin and/or microtubules. In column 1 of this patent, some “prior art” magnetic field generators were described; and they also may be so used. It was stated in such column 1 that: “There has recently been an increased interest in therapeutic application of magnetic fields. There have also been earlier efforts of others in this area. The recent efforts, as well as those earlier made, can be categorized into three general types, based on the mechanism for generating and applying the magnetic field. The first type was what could be generally referred to as systemic applications. These were large, tubular mechanisms which could accommodate a human body within them. A patient or recipient could thus be subjected to magnetic therapy through their entire body. These systems were large, cumbersome and relatively immobile. Examples of this type of therapeutic systems included U.S. Pat. Nos. 1,418,903; 4,095,588; 5,084,003; 5,160,591; and 5,437,600. A second type of system was that of magnetic therapeutic applicator systems in the form of flexible panels, belts or collars, containing either electromagnets or permanent magnets. These applicator systems could be placed on or about portion of the recipient's body to allow application of the magnetic therapy. Because of their close proximity to the recipient's body, considerations limited the amount and time duration of application of magnetic therapy. Examples of this type system were U.S. Pat. Nos. 4,757,804; 5,084,003 and 5,344,384. The third type of system was that of a cylindrical or toroidal magnetic field generator, often small and portable, into which a treatment recipient could place a limb to receive electromagnetic therapy. Because of size and other limitations, the magnetic field strength generated in this type system was usually relatively low. Also, the magnetic field was a time varying one. Electrical current applied to cause the magnetic field was time varying, whether in the form of simple alternating current waveforms or a waveform composed of a series of time-spaced pulses.”

[0461] The magnetic field generator claimed in U.S. Pat. No. 6,641,520 comprised “ . . . a magnetic field generating coil composed of a wound wire coil generating the static magnetic field in response to electrical power; a mounting member having the coil mounted thereon and having an opening therethrough of a size to permit insertion of a limb of the recipient in order to receive electromagnetic therapy from the magnetic field coil; an electrical power supply furnishing power to the magnetic field coil to cause the coil to generate a static electromagnetic field within the opening of the mounting member for application to the recipient's limb; a level control mechanism providing a reference signal representing a specified electro-magnetic field strength set point for regulating the power furnished to the magnetic field coil; a field strength sensor detecting the static electromagnetic field strength generated by the magnetic field coil and forming a field strength signal representing the detected electro-magnetic field strength in the opening in the mounting member; a control signal generator receiving the field strength signal from the field strength sensor and the reference signal from the level control mechanism representing a specified electromagnetic field strength set point; and the control signal generator forming a signal to regulate the power flowing from the electrical power supply to the magnetic field coil.”

[0462] An implantable sensor is disclosed in U.S. Pat. No. 6,491,639, the entire disclosure of which is hereby incorporated by reference into this specification; this sensor also may be used in conjunction with the anti-mitotic compound of this invention, and/or tubulin, and/or microtubules. Claim 1 of such patent describes: “An implantable medical device including a sensor for use in detecting the hemodynamic status of a patient comprising: a hermetic device housing enclosing device electronics for receiving and processing data; and said device housing including at least one recess and a sensor positioned in said at least one recess.” Claim 10 of such patent describes “10. An implantable medical device including a hemodynamic sensor for monitoring arterial pulse amplitude comprising: a device housing; a transducer comprising a light source and a light detector positioned exterior to said device housing responsive to variations in arterial pulse amplitude; and wherein said light detector receives light originating from said light source and reflected from arterial vasculature of a patient and generates a signal which is indicative of variations in the reflected light caused by the expansion and contraction of said arterial vasculature. “Claim 14 of such patent describes: “14. An implantable medical device including a hemodynamic sensor for monitoring arterial pulse amplitude comprising: a device housing; and an ultrasound transducer associated with said device housing responsive to variations in arterial pulse amplitude.” Claim 15 of such patent describes: “15. An implantable medical device including a hemodynamic sensor for monitoring arterial pulse amplitude comprising: a device housing; and a transducer associated with said device housing responsive to variations in arterial pulse amplitude, said device housing having at least one substantially planar face and said transducer is positioned on said planar face.” Claim 17 of such patent describes “ . . . an implantable pulse generator . . . ’

[0463] U.S. Pat. No. 6,663,555, the entire disclosure of which is incorporated by reference into this specification, also claims a magnetic field generator; this magnetic field generator may be used in conjunction with the anti-mitotic compound of this invention and/or tubulin and/or microtubules. Claim 1 of this patent describes: “A magnet keeper-shield assembly for housing a magnet, said magnet keeper-shield assembly comprising: a keeper-shield comprising a material substantially permeable to a magnetic flux; a cavity in the keeper-shield, said cavity comprising an inner side wall and a base, and said cavity being adapted to accept a magnet having a front and a bottom face; an actuator extending through the base; a plurality of springs extending through the base, said springs operative to exert a force in a range from about 175 pounds to about 225 pounds on the bottom face of the magnet in a retracted position, and wherein said magnet produces at least about 118 gauss at a distance of about 10 cm from the front face in the extended position and produces at most about 5 gauss at a distance less than or equal to about 22 cm from the front face in the retracted position.”

[0464] Published United States patent application US2002/0182738 discloses an implantable flow cytometer; the entire disclosure of this published United States patent application is hereby incorporated by reference into this specification. Claim 1 of this patent describes “A flow cytometer comprising means for sampling cellular material within a body, means for marking cells within said bodily fluid with a marker to produce marked cells, means for analyzing said marked cells, a first means for removing said marker from said marked cells, a second means for removing said marker from said marked cells, means for sorting said cells within said bodily fluid to produce sorted cells, and means for maintaining said sorted cells in a viable state.”

[0465] Referring again to published United States patent application US2002/0182738, the implantable flow cytometer may contain “ . . . a first control valve operatively connected to said first means for removing said marker from said marked cells and to said second means for removing said marker from said marked cells . . . ” (see claim 3), a controller connected to the first control valve (claim 4), a second control valve (claim 5), a third control valve (claim 6), a dye separator (claims 7 and 8), an analyzer for testing blood purity (claim 9), etc.

[0466] A similar flow cytometer is disclosed in published United States patent application US2003/0036718, the entire disclosure of which is also hereby incorporated by reference into this specification.

[0467] Published United States patent application US2003/0036776, the entire disclosure of which is hereby incorporated by reference into this specification, discloses an MRI-compatible implantable device. Claim 1 of this patent describes “A cardiac assist device comprising means for connecting said cardiac assist device to a heart, means for furnishing electrical impulses from said cardiac assist device to said heart, means for ceasing the furnishing of said electrical impulses to said heart, means for receiving pulsed radio frequency fields, means for transmitting and receiving optical signals, and means for protecting said heart and said cardiac assist device from currents induced by said pulsed radio frequency fields, wherein said cardiac assist device contains a control circuit comprised of a parallel resonant frequency circuit and means for activating said parallel resonant frequency circuit.”

[0468] The “ . . . means for activating said parallel resonant circuit . . . ” may contain “ . . . comprise optical means (see claim 2) such as an optical switch (claim 3) comprised of “ . . . a pin type diode . . . ” (claim 4) and connected to an optical fiber (claim 5). The optical switch may be “ . . . activated by light from a light source . . . ” (claim 6), and it may be located with a biological organism (claim 7). The light source may be located within the biological organism (claim 9), and it may provide “ . . . light with a wavelength of from about 750 to about 850 nanometers . . . .”

Polymeric Carriers and/or Delivery Systems

[0469] The anti-mitotic compound of this invention may be used in conjunction with prior art polymeric carriers and/or delivery systems comprised of polymeric material.

[0470] In one embodiment, the polymeric material is preferably comprised of one or more anti-mitotic compounds that are adapted to be released from the polymeric material when the polymeric material is disposed within a biological organism. The polymeric material may be, e.g., any of the drug eluting polymers known to those skilled in the art.

[0471] By way of illustration, and referring to U.S. Pat. No. 3,279,996 (the entire disclosure of which is hereby incorporated by reference into this specification), the polymeric material may be silicone rubber. This patent claims “An implantate for releasing a drug in the tissues of a living organism comprising a drug enclosed in a capsule of silicone rubber, . . . said drug being soluble in and capable of diffusing through said silicone rubber to the outer surface of said capsule . . . .” One may use, as the anti-mitotic compound a material that is soluble in and capable of diffusing through the polymeric material.

[0472] At column 1 of U.S. Pat. No. 3,279,996, other “carrier agents” which may be used as polymeric material are also disclosed, including “ . . . beeswax, peanut oil, stearates, etc.” Any of these “carrier agents” may be used as the polymeric material.

[0473] By way of further illustration, and as is disclosed in U.S. Pat. No. 4,191,741 (the entire disclosure of which is hereby incorporated by reference into this specification), one may use dimethylpolsiloxane rubber as the polymeric material. This patent claims “A solid, cylindrical, subcutaneous implant for improving the rate of weight gain of ruminant animals which comprises (a) a biocompatible inert core having a diameter of from about 2 to about 10 mm. and (b) a biocompatible coating having a thickness of from about 0.2 to about 1 mm., the composition of said coating comprising from about 5 to about 40 percent by weight of estradiol and from about 95 to about 60 percent by weight of a dimethylpolysiloxane rubber.”

[0474] In column 1 of U.S. Pat. No. 4,191,741, other materials which may be used as the polymeric material are disclosed. Thus, it is stated in such patent that “Long et al. U.S. Pat. No. 3,279,996 describes an implant for releasing a drug in the tissues of a living organism comprising the drug enclosed in a capsule formed of silicone rubber. The drug migrates through the silicone rubber wall and is slowly released into the living tissues. A number of biocompatible silicone rubbers are described in the Long et al. patent. When a drug delivery system such as that described in U.S. Pat. No. 3,279,996 is used in an effort to administer estradiol to a ruminant animal a number of problems are encountered. For example, an excess of the drug is generally required in the hollow cavity of the implant. Also, it is difficult to achieve a constant rate of administration of the drug over a long time period such as from 200 to 400 days as would be necessary for the daily administration of estradiol to a growing beef animal. Katz et al. U.S. Pat. No. 4,096,239 describes an implant pellet containing estradiol or estradiol benzoate which has an inert spherical core and a uniform coating comprising a carrier and the drug. The coating containing the drug must be both biocompatible and biosoluble, i.e., the coating must dissolve in the body fluids which act upon the pellet when it is implanted in the body. The rate at which the coating dissolves determines the rate at which the drug is released. Representative carriers for use in the coating material include cholesterol, solid polyethylene glycols, high molecular weight fatty acids and alcohols, biosoluble waxes, cellulose derivatives and solid polyvinyl pyrrolidone.” The polymeric material used with the anti-mitotic compound is, in one embodiment, both biocompatible and biosoluble.

[0475] By way of yet further illustration, and referring to U.S. Pat. No. 4,429,080 (the entire disclosure of which is hereby incorporated by reference into this specification), the polymeric material may be a synthetic absorbable copolymer formed by copolymerizing glycolide with trimethylene carbonate.

[0476] By way of yet further illustration, and referring to U.S. Pat. No. 4,581,028 (the entire disclosure of which is hereby incorporated by reference into this specification), the polymeric material may be selected from the group consisting of polyester (such as Dacron), polytetrafluoroethylene, polyurethane silicone-based material, and polyamide. The polymeric material of this patent is comprised “ . . . of at least one antimicrobial agent selected from the group consisting of the metal salts of sulfonamides.” In one embodiment, the polymeric material is comprised of an antimicrobial agent.

[0477] By way of yet further illustration, and referring to U.S. Pat. No. 4,481,353, (the entire disclosure of which is hereby incorporated by reference into this specification), the polymeric material may be the bioresorbable polyester disclosed in such patent. U.S. Pat. No. 4,481,353 claims “A bioresorbable polyester in which monomeric subunits are arranged randomly in the polyester molecules, said polyester comprising the condensation reaction product of a Krebs Cycle dicarboxylic acid or isomer or anhydride thereof, chosen for the group consisting of succinic acid, fumaric acid, oxaloacetic acid, L-malic acid, and D-malic acid, a diol having 2, 4, 6, or 8 carbon atoms, and an alpha-hydroxy carboxylic acid chosen from the group consisting of glycolic acid, L-lactic acid and D-lactic acid.”

[0478] By way of yet further illustration, and referring to U.S. Pat. No. 4,846,844 (the entire disclosure of which is hereby incorporated by reference into this specification), the polymeric material may be a silicone polymer matrix in which an anabolic agent (such as an anabolic steroid, or estradiol) is disposed. This patent claims “An implant adapted for the controlled release of an anabolic agent, said implant comprising a silicone polymer matrix, an anabolic agent in said polymer matrix, and an antimicrobial coating, wherein the coating comprises a first-applied non-vulcanizing silicone fluid and a subsequently applied antimicrobial agent in contact with said fluid.”

[0479] By way of yet further illustration, and referring to U.S. Pat. No. 4,916,193 (the entire disclosure of which is hereby incorporated by reference into this specification), the polymeric material may be a copolymer containing carbonate repeat units and ester repeat units (see, e.g., claim 1 of the patent). As disclosed in column 2 of the patent, it may also be “collagen,” “homopolymers and copolymers of glycolic acid and lactic acid,” “alpha-hydroxy carboxylic acids in conjunction with Krebs cycle dicarboxylic acids and aliphatic diols,” “polycarbonate-containing polymers,” and “high molecular weight fiber-forming crystalline copolymers of lactide and glycolide.” Thus, it is disclosed in such column 2 that: “Various polymers have been proposed for use in the fabrication of bioresorbable medical devices. Examples of absorbable materials used in nerve repair include collagen as disclosed by D. G. Kline and G. J. Hayes, “The Use of a Resorbable Wrapper for Peripheral Nerve Repair, Experimental Studies in Chimpanzees”, J. Neurosurgery 21, 737 (1964). Artandi et al., U.S. Pat. No. 3,272,204 (1966) reports the use of collagen protheses that are reinforced with nonabsorbable fabrics. These articles are intended to be placed permanently in a human body. However, one of the disadvantages inherent with collagenous materials, whether utilized alone or in conjunction with biodurable materials, is their potential antigenicity. Other biodegradable polymers of particular interest for medical implantation purposes are homopolymers and copolymers of glycolic acid and lactic acid. A nerve cuff in the form of a smooth, rigid tube has been fabricated from a copolymer of lactic and glycolic acids [The Hand; 10 (3) 259 (1978)]. European patent application No.118-458-A discloses biodegradable materials used in organ protheses or artificial skin based on poly-L-lactic acid and/or poly-DL-lactic acid and polyester or polyether urethanes. U.S. Pat. No. 4,481,353 discloses bioresorbable polyester polymers, and composites containing these polymers, that are also made up of alpha-hydroxy carboxylic acids, in conjunction with Krebs cycle dicarboxylic acids and aliphatic diols. These polyesters are useful in fabricating nerve guidance channels as well as other surgical articles such as sutures and ligatures. U.S. Pat. Nos. 4,243,775 and 4,429,080 disclose the use of polycarbonate-containing polymers in certain medical applications, especially sutures, ligatures and haemostatic devices. However, this disclosure is clearly limited only to “AB” and “ABA” type block copolymers where only the “B” block contains poly(trimethylene carbonate) or a random copolymer of glycolide with trimethylene carbonate and the “A” block is necessarily limited to glycolide. In the copolymers of this patent, the dominant portion of the polymer is the glycolide component. U.S. Pat. No. 4,157,437 discloses high molecular weight, fiber-forming crystalline copolymers of lactide and glycolide which are disclosed as useful in the preparation of absorbable surgical sutures. The copolymers of this patent contain from about 50 to 75 wt. % of recurring units derived from glycolide.”

[0480] By way of further illustration, and referring to U.S. Pat. No. 5,176,907 (the entire disclosure of which is hereby incorporated by reference into this specification), the polymeric material may be the poly-phosphoester-urethane) described and claimed in claim 1 of such patent. Furthermore, the polymeric material may be one or more of the biodegradable polymers discussed in columns 1 and 2 of such patent. As is disclosed in such columns 1 and 2: “Polymers have been used as carriers of therapeutic agents to effect a localized and sustained release (Controlled Drug Delivery, Vol. I and II, Bruck, S. D., (ed.), CRC Press, Boca Raton, Fla., 1983; Leong, et al., Adv. Drug Delivery Review, 1:199, 1987). These anti-mitotic compound delivery systems simulate infusion and offer the potential of enhanced therapeutic efficacy and reduced systemic toxicity.” The polymeric material may be such a poly-phosphoester-urethane.

[0481] U.S. Pat. No. 5,176,907 also discloses “For a non-biodegradable matrix, the steps leading to release of the anti-mitotic compound are water diffusion into the matrix, dissolution of the therapeutic agent, and out-diffusion of the anti-mitotic compound through the channels of the matrix. As a consequence, the mean residence time of the anti-mitotic compound existing in the soluble state is longer for a non-biodegradable matrix than for a biodegradable matrix where a long passage through the channels is no longer required. Since many pharmaceuticals have short half-lives it is likely that the anti-mitotic compound is decomposed or inactivated inside the non-biodegradable matrix before it can be released. This issue is particularly significant for many bio-macromolecules and smaller polypeptides, since these molecules are generally unstable in buffer and have low permeability through polymers. In fact, in a non-biodegradable matrix, many bio-macromolecules will aggregate and precipitate, clogging the channels necessary for diffusion out of the carrier matrix. This problem is largely alleviated by using a biodegradable matrix which allows controlled release of the therapeutic agent. Biodegradable polymers differ from non-biodegradable polymers in that they are consumed or biodegraded during therapy. This usually involves breakdown of the polymer to its monomeric subunits, which should be biocompatible with the surrounding tissue. The life of a biodegradable polymer in vivo depends on its molecular weight and degree of cross-linking; the greater the molecular weight and degree of crosslinking, the longer the life. The most highly investigated biodegradable polymers are polylactic acid (PLA), polyglycolic acid (PGA), polyglycolic acid (PGA), copolymers of PLA and PGA, polyamides, and copolymers of polyamides and polyesters. PLA, sometimes referred to as polylactide, undergoes hydrolytic de-esterification to lactic acid, a normal product of muscle metabolism. PGA is chemically related to PLA and is commonly used for absorbable surgical sutures, as is the PLA/PGA copolymer. However, the use of PGA in controlled-release implants has been limited due to its low solubility in common solvents and subsequent difficulty in fabrication of devices.” The polymeric material 14 may be a biodegradable polymeric material.

[0482] U.S. Pat. No. 5,176,907 also discloses “An advantage of a biodegradable material is the elimination of the need for surgical removal after it has fulfilled its mission. The appeal of such a material is more than simply for convenience. From a technical standpoint, a material which biodegrades gradually and is excreted over time can offer many unique advantages.”

[0483] U.S. Pat. No. 5,176,907 also discloses “A biodegradable therapeutic agent delivery system has several additional advantages: 1) the therapeutic agent release rate is amenable to control through variation of the matrix composition; 2) implantation can be done at sites difficult or impossible for retrieval; 3) delivery of unstable therapeutic agents is more practical. This last point is of particular importance in light of the advances in molecular biology and genetic engineering which have lead to the commercial availability of many potent bio-macromolecules. The short in vivo half-lives and low GI tract absorption of these polypeptides render them totally unsuitable for conventional oral or intravenous administration. Also, because these substances are often unstable in buffer, such polypeptides cannot be effectively delivered by pumping devices.”

[0484] U.S. Pat. No. 5,176,907 also discloses “In its simplest form, a biodegradable therapeutic agent delivery system consist of a dispersion of the drug solutes in a polymer matrix. The therapeutic agent is released as the polymeric matrix decomposes, or biodegrades into soluble products which are excreted from the body. Several classes of synthetic polymers, including polyesters (Pitt, et al., in Controlled Release of Bioactive Materials, R. Baker, Ed., Academic Press, New York, 1980); polyamides (Sidman, et al., Journal of Membrane Science, 7:227, 1979); polyurethanes (Maser, et al., Journal of Polymer Science, Polymer Symposium, 66:259, 1979); polyorthoesters (Heller, et al., Polymer Engineering Science, 21:727, 1981); and polyanhydrides (Leong, et al., Biomaterials, 7:364, 1986) have been studied for this purpose.” The “therapeutic agent” used in this (and other) patents may be the anti-mitotic compound of this invention.

[0485] By way of yet further illustration, and referring to U.S. Pat. No. 5,194,581 (the entire disclosure of which is hereby incorporated by reference into this specification), the polymeric material may the poly (phosphoester) compositions described in such patent.

[0486] The polymeric material may be in the form of microcapsules within which the anti-mitotic compound of this invention is disposed. Thus, one may use microcapsules such as, e.g., the microcapsule described in U.S. Pat. No. 6,117,455, the entire disclosure of which is hereby incorporated by reference into this specification. As is disclosed in the abstract of this patent, there is provided “A sustained-release microcapsule contains an amorphous water-soluble pharmaceutical agent having a particle size of from 1 nm-10 μm and a polymer. The microcapsule is produced by dispersing, in an aqueous phase, a dispersion of from 0.001-90% (w/w) of an amorphous water-soluble pharmaceutical agent in a solution of a polymer having a wt. avg. molecular weight of 2,000 in an organic solvent to prepare an s/o/w emulsion and subjecting the emulsion to in-water drying.”

[0487] In one embodiment, disclosed in U.S. Pat. No. 5,484,584 (the entire disclosure of which is hereby incorporated by reference into this specification), a poly (benzyl-L-glutamate) microsphere is disclosed (see, e.g., claim 10); the anti-mitotic compound of this invention may be disposed within and/or on the surface of such microsphere. As is disclosed in the abstract of this patent, “The present invention relates to a highly efficient method of preparing modified microcapsules exhibiting selective targeting. These microcapsules are suitable for encapsulation surface attachment of therapeutic and diagnostic agents. In one aspect of the invention, surface charge of the polymeric material is altered by conjugation of an amino acid ester to the providing improved targeting of encapsulated agents to specific tissue cells. Examples include encapsulation of radiodiagnostic agents in 1 μm capsules to provide improved opacification and encapsulation of cytotoxic agents in 100 μm capsules for chemoembolization procedures. The microcapsules are suitable for attachment of a wide range of targeting agents, including antibodies, steroids and drugs, which may be attached to the microcapsule polymer before or after formation of suitably sized microcapsules. The invention also includes microcapsules surface modified with hydroxyl groups. Various agents such as estrone may be attached to the microcapsules and effectively targeted to selected organs.”

[0488] The release rate of the anti-mitotic compound from the polymeric material may be varied in, e.g., the manner suggested in column 6 of U.S. Pat. No. 5,194,581, the entire disclosure of which is hereby incorporated by reference into this specification. As is disclosed in such column 6, “A wide range of degradation rates can be obtained by adjusting the hydrophobicities of the backbones of the polymers and yet the biodegradability is assured. This can be achieved by varying the functional groups R or R′. The combination of a hydrophobic backbone and a hydrophilic linkage also leads to heterogeneous degradation as cleavage is encouraged, but water penetration is resisted.” As is disclosed at column 9 of such patent, “The rate of biodegradation of the poly(phosphoester) compositions of the invention may also be controlled by varying the hydrophobicity of the polymer. The mechanism of predictable degradation preferably relies on either group R′ in the poly(phosphoester) backbone being hydrophobic for example, an aromatic structure, or, alternatively, if the group R′ is not hydrophobic, for example an aliphatic group, then the group R is preferably aromatic. The rates of degradation for each poly(phosphoester) composition are generally predictable and constant at a single pH. This permits the compositions to be introduced into the individual at a variety of tissue sites. This is especially valuable in that a wide variety of compositions and devices to meet different, but specific, applications may be composed and configured to meet specific demands, dimensions, and shapes—each of which offers individual, but different, predictable periods for degradation. When the composition of the invention is used for long term delivery of an anti-mitotic compound relatively hydrophobic backbone matrix, for example, containing bisphenol A, is preferred. It is possible to enhance the degradation rate of the poly(phosphoester) or shorten the functional life of the device, by introducing hydrophilic or polar groups, into the backbone matrix. Further, the introduction of methylene groups into the backbone matrix will usually increase the flexibility of the backbone and decrease the crystallinity of the polymer. Conversely, to obtain a more rigid backbone matrix, for example, when used orthopedically, an aromatic structure, such as a diphenyl group, can be incorporated into the matrix. Also, the poly(phosphoester) can be crosslinked, for example, using 1,3,5-trihydroxybenzene or (CH2OH)4C, to enhance the modulus of the polymer. Similar considerations hold for the structure of the side chain (R).”

[0489] By way of yet further illustration, and referring to U.S. Pat. No. 5,252,713 (the entire disclosure of which is hereby incorporated by reference into this specification), the polymeric material may be a polypeptide comprising at least one drug-binding domain that non-covalently binds a drug. The means of identifying and isolating such a polypeptide is described at columns 5-7 of the patent, wherein it is disclosed that: “The process of isolating a polymeric carrier from a drug-binding, large molecular weight protein begins with the identification of a large protein that can non-covalently bind the drug of interest. Examples of such protein/drug pairs are shown in Table I. The drugs in the Table (other than the steroids) are anti-cancer drugs . . . ”

[0490] As is also disclosed in U.S. Pat. No. 5,252,713, “Other drug-binding proteins may be identified by appropriate analytical procedures, including Western blotting of large proteins or protein fragments and subsequent incubation with a detectable form of drug. Alternative procedures include combining a drug and a protein in a solution, followed by size exclusion HPLC gel filtration, thin-layer chromatography (TLC), or other analytical procedures that can discriminate between free and protein-bound drug. Detection of drug binding can be accomplished by using radiolabeled, fluorescent, or colored drugs and appropriate detection methods. Equilibrium dialysis with labeled drug may be used. Alternative methods include monitoring the fluorescence change that occurs upon binding of certain drugs (e.g., anthracyclines or analogs thereof, which should be fluorescent) . . . . “ In one detection method, drug and protein are mixed, and an aliquot of this solution (not exceeding 5% of the column volume of an HPLC column, such as a Bio-sil TSK-250 7.5×30 cm column) is loaded onto the HPLC column. The flow rate is 1 ml/min. The drug bound to protein will elute first, in a separate peak, followed by free drug, eluting at a position characteristic of its molecular weight. If the drug is doxorubicin, both a 280-nm as well as a 495-nm adsorptive peak will correspond to the elution position of the protein if interaction occurs. The elution peaks for other drugs will indicate whether drug binding occurs . . . .”

[0491] As is also disclosed in U.S. Pat. No. 5,252,713, “Knowledge of the chemical structure of a particular drug (i.e., whether chemically reactive functional groups are present) allows one to predict whether covalent binding of the drug to a given protein can occur. Additional methods for determining whether drug binding is covalent or non-covalent include incubating the drug with the protein, followed by dialysis or subjecting the protein to denaturing conditions. Release of the drug from the drug-binding protein during these procedures indicates that the drug was non-covalently bound. Usually, a dissociation constant of about 10-15 M or less indicates covalent or extremely tight non-covalent binding . . . .”

[0492] As is also disclosed in U.S. Pat. No. 5,252,713, “During dialysis, non-covalently bound drug molecules are released over time from the protein and pass through a dialysis membrane, whereas covalently bound drug molecules are retained on the protein. An equilibrium constant of about 10-5 M indicates non-covalent binding. Alternatively, the protein may be subjected to denaturing conditions; e.g., by gel electrophoresis on a denaturing (SDS) gel or on a gel filtration column in the presence of a strong denaturant such as 6M guanidine. Covalently bound drug molecules remain bound to the denatured protein, whereas non-covalently bound drug molecules are released and migrate separately from the protein on the gel and are not retained with the protein on the column.”

[0493] As is also disclosed in U.S. Pat. No. 5,252,713, “Once a protein that can non-covalently bind a particular drug of interest is identified, the drug-binding domain is identified and isolated from the protein by any suitable means. Protein domains are portions of proteins having a particular function or activity (in this case, non-covalent binding of drug molecules). The present invention provides a process for producing a polymeric carrier, comprising the steps of generating peptide fragments of a protein that is capable of non-covalently binding a drug and identifying a drug-binding peptide fragment, which is a peptide fragment containing a drug-binding domain capable of non-covalently binding the drug, for use as the polymeric carrier.”

[0494] As is also disclosed in U.S. Pat. No. 5,252,713, “One method for identifying the drug-binding domain begins with digesting or partially digesting the protein with a proteolytic enzyme or specific chemicals to produce peptide fragments. Examples of useful proteolytic enzymes include lys-C-endoprotease, arg-C-endoprotease, V8 protease, endoprolidase, trypsin, and chymotrypsin. Examples of chemicals used for protein digestion include cyanogen bromide (cleaves at methionine residues), hydroxylamine (cleaves the Asn-Gly bond), dilute acetic acid (cleaves the Asp-Pro bond), and iodosobenzoic acid (cleaves at the tryptophane residue). In some cases, better results may be achieved by denaturing the protein (to unfold it), either before or after fragmentation.”

[0495] As is also disclosed in U.S. Pat. No. 5,252,713, “The fragments may be separated by such procedures as high pressure liquid chromatography (HPLC) or gel electrophoresis. The smallest peptide fragment capable of drug binding is identified using a suitable drug-binding analysis procedure, such as one of those described above. One such procedure involves SDS-PAGE gel electrophoresis to separate protein fragments, followed by Western blotting on nitrocellulose, and incubation with a colored drug like adriamycin. The fragments that have bound the drug will appear red. Scans at 495 nm with a laser densitometer may then be used to analyze (quantify) the level of drug binding.”

[0496] As is also disclosed in U.S. Pat. No. 5,252,713, “Preferably, the smallest peptide fragment capable of non-covalent drug binding is used. It may occasionally be advisable, however, to use a larger fragment, such as when the smallest fragment has only a low-affinity drug-binding domain.”

[0497] As is also disclosed in U.S. Pat. No. 5,252,713, “The amino acid sequence of the peptide fragment containing the drug-binding domain is elucidated. The purified fragment containing the drug-binding region is denatured in 6M guanidine hydrochloride, reduced and carboxymethylated by the method of Crestfield et al., J. Biol. Chem. 238:622, 1963. As little as 20 to 50 picomoles of each peptide fragment can be analyzed by automated Edman degradation using a gas-phase or liquid pulsed protein sequencer (commercially available from Applied Biosystems, Inc.). If the peptide fragment is longer than 30 amino acids, it will most likely have to be fragmented as above and the amino acid sequence patched together from sequences of overlapping fragments.”

[0498] As is also disclosed in U.S. Pat. No. 5,252,713, “Once the amino acid sequence of the desired peptide fragment has been determined, the polymeric carriers can be made by either one of two types of synthesis. The first type of synthesis comprises the preparation of each peptide chain with a peptide synthesizer (e.g., commercially available from Applied Biosystems). The second method utilizes recombinant DNA procedures.” The polymeric material 14 may comprise one or more of the polymeric carriers described in U.S. Pat. No. 5,252,713.

[0499] As is also disclosed in U.S. Pat. No. 5,252,713, “Peptide amides can be made using 4-methylbenzhydrylamine-derivatized, cross-linked polystyrene-1% divinylbenzene resin and peptide acids made using PAM (phenylacetamidomethyl) resin (Stewart et al., “Solid Phase Peptide Synthesis,” Pierce Chemical Company, Rockford, Ill., 1984). The synthesis can be accomplished either using a commercially available synthesizer, such as the Applied Biosystems 430A, or manually using the procedure of Merrifield et al., Biochemistry 21:5020-31,1982; or Houghten, PNAS 82:5131-35,1985. The side chain protecting groups are removed using the Tam-Merrifield low-high HF procedure (Tam et al., J. Am. Chem. Soc. 105:6442-55, 1983). The peptide can be extracted with 20% acetic acid, lyophilized, and purified by reversed-phase HPLC on a Vydac C-4 Analytical Column using a linear gradient of 100% water to 100% acetonitrile-0.1% trifluoroacetic acid in 50 minutes. The peptide is analyzed using PTC-amino acid analysis (Heinrikson et al., Anal. Biochem. 136:65-74,1984). After gas-phase hydrolysis (Meltzer et al., Anal. Biochem. 160: 356-61, 1987), sequences are confirmed using the Edman degradation or fast atom bombardment mass spectroscopy. After synthesis, the polymeric carriers can be tested for drug binding using size-exclusion HPLC, as described above, or any of the other analytical methods listed above.”

[0500] The polymeric carriers of U.S. Pat. No. 5,252,713 may be used with the anti-mitotic compounds of this invention. As is also disclosed in U.S. Pat. No. 5,252,713, “The polymeric carriers of the present invention preferably comprise more than one drug-binding domain. A polypeptide comprising several drug-binding domains may be synthesized. Alternatively, several of the synthesized drug-binding peptides may be joined together using bifunctional cross-linkers, as described below.” The polymeric material in one embodiment, comprises more than one drug-binding domain.

[0501] By way of yet further illustration, and referring to U.S. Pat. No. 5,420,105 (the entire disclosure of which is hereby incorporated by reference into this specification), the polymeric material may form a conjugate with a ligand. Thus, and referring to claim 1 of such patent, such conjugate may be “A ligand or an anti-ligand/polymeric carrier/drug conjugate comprising a ligand consisting of biotin or an anti-ligand selected from the group consisting of avidin and streptavidin, which ligand or anti-ligand is covalently bound to a polymeric carrier that comprises at least one drug-binding domain derived from a drug-binding protein, and at least one drug non-covalently bound to the polymeric carrier, wherein the polymeric carrier does not comprise an entire drug-binding protein, but is derived from a drug-binding domain of said drug-binding protein which derivative non-covalently binds a drug which is non-covalently bound by an entire naturally occurring drug-binding protein, and wherein the molecular weight of the polymeric carrier is less than about 60,000 daltons, and wherein said drug is selected from the group consisting of an anti-cancer anthracycline antibiotic, cis-platinum, methotrexate, vinblastine, mitoxanthrone ARA-C, 6-mercaptopurine, 6-mercaptoguanosine, mytomycin C and a steroid.”

[0502] The polymeric material form comprise a reservoir (see U.S. Pat. No. 5,447,724) for the anti-mitotic compound(s). Such a reservoir may be constructed in accordance with the procedure described in U.S. Pat. No. 5,447,724, which claims “A medical device at least a portion of which comprises: a body insertable into a patient, said body having an exposed surface which is adapted for exposure to tissue of a patient and constructed to release, at a predetermined rate, therapeutic agent to inhibit adverse physiological reaction of said tissue to the presence of the body of said medical device, said therapeutic agent selected from the group consisting of antithrombogenic agents, antiplatelet agents, prostaglandins, thrombolytic drugs, antiproliferative drugs, antirejection drugs, antimicrobial drugs, growth factors, and anticalcifying agents, at said exposed surface, said body including: an outer polymer metering layer, and an internal polymer layer underlying and supporting said outer polymer metering layer and in intimate contact therewith, said internal polymer layer defining a reservoir for said therapeutic agent, said reservoir formed by a polymer selected from the group consisting of polyurethanes and its copolymers, silicone and its copolymers, ethylene vinylacetate, thermoplastic elastomers, polyvinylchloride, polyolefins, cellulosics, polyamides, polytetrafluoroethylenes, polyesters, polycarbonates, polysulfones, acrylics, and acrylonitrile butadiene styrene copolymers, said outer polymer metering layer having a stable, substantially uniform, predetermined thickness covering the underlying reservoir so that no portion of the reservoir is directly exposed to body fluids and incorporating a distribution of an elutable component which, upon exposure to body fluid, elutes from said outer polymer metering layer to form a predetermined porous network capable of exposing said anti-mitotic compound in said reservoir in said internal polymer layer to said body fluid, said elutable component is selected from the group consisting of polyethylene oxide, polyethylene glycol, polyethylene oxide/polypropylene oxide copolymers, polyhydroxyethylmethacrylate, polyvinylpyrollidone, polyacrylamide and its copolymers, liposomes, albumin, dextran, proteins, peptides, polysaccharides, polylactides, polygalactides, polyanhydrides, polyorthoesters and their copolymers, and soluble cellulosics, said reservoir defined by, said internal polymer layer incorporating said therapeutic agent in a manner that permits substantially free outward release of said therapeutic agent from said reservoir into said porous network of said outer polymer metering layer as said elutable component elutes from said polymer metering layer, said predetermined thickness and the concentration and particle size of said elutable component being selected to enable said outer polymer metering layer to meter the rate of outward migration of the therapeutic agent from said internal reservoir layer through said outer polymer metering layer, said outer polymer metering layer and said internal polymer layer, in combination, enabling prolonged controlled release, at said predetermined rate, of said therapeutic agent at an effective dosage level from said exposed surface of said body of said medical device to the tissue of said patient to inhibit adverse reaction of the patient to the prolonged presence of said body of said medical device in said patient.”

[0503] U.S. Pat. No. 5,447,724 also discloses the preparation of the “reservoir” in e.g., in columns 8 and 9 of the patent, wherein it is disclosed that: “A particular advantage of the time-release polymers of the invention is the manufacture of coated articles, i.e., medical instruments. Referring now to FIG. 3, the article to be coated such as a catheter 50 may be mounted on a mandrel or wire 60 and aligned with the preformed apertures 62 (slightly larger than the catheter diameter) in the teflon bottom piece 63 of a boat 64 that includes a mixture 66 of polymer at ambient temperature, e.g., 25° C. To form the reservoir portion, the mixture may include, for example, nine parts solvent, e.g. tetrahydrofuran (THF), and one part Pellthane® polyurethane polymer which includes the desired proportion of ground sodium heparin particles. The boat may be moved in a downward fashion as indicated by arrow 67 to produce a coating 68 on the exterior of catheter 50. After a short (e.g., 15 minutes) drying period, additional coats may be added as desired. After coating, the catheter 50 is allowed to air dry at ambient temperature for about two hours to allow complete solvent evaporation and/or polymerization to form the reservoir portion. For formation of the surface-layer the boat 64 is cleaned of the reservoir portion mixture and filled with a mixture including a solvent, e.g. THF (9 parts) and Pellthane® (1 part) having the desired amount of elutable component. The boat is moved over the catheter and dried, as discussed above to form the surface-layer. Subsequent coats may also be formed. An advantage of the dipping method and apparatus described with regard to FIG. 3 is that highly uniform coating thickness may be achieved since each portion of the substrate is successively in contact with the mixture for the same period of time and further, no deformation of the substrate occurs. Generally, for faster rates of movement of the boat 64, thicker layers are formed since the polymer gels along the catheter surfaces upon evaporation of the solvent, rather than collects in the boat as happens with slower boat motion. For thin layers, e.g., on the order of a few mils, using a fairly volatile solvent such as THF, the dipping speed is generally between 26 to 28 cm/min for the reservoir portion and around 21 cm/min for the outer layer for catheters in the range of 7 to 10 F. The thickness of the coatings may be calculated by subtracting the weight of the coated catheter from the weight of the uncoated catheter, dividing by the calculated surface area of the uncoated substrate and dividing by the known density of the coating. The solvent may be any solvent that solubilizes the polymer and preferably is a more volatile solvent that evaporates rapidly at ambient temperature or with mild heating. The solvent evaporation rate and boat speed are selected to avoid substantial solubilizing of the catheter substrate or degradation of a prior applied coating so that boundaries between layers are formed.”

[0504] By way of yet further illustration, and referring to U.S. Pat. No. 5,464,650 (the entire disclosure of which is hereby incorporated by reference into this specification), the polymeric material may be one or of the polymeric materials discussed at columns 4 and 5 of such patent. Referring to such columns 4 and 5, it is disclosed that: “The polymer chosen must be a polymer that is biocompatible and minimizes irritation to the vessel wall when the stent is implanted. The polymer may be either a biostable or a bioabsorbable polymer depending on the desired rate of release or the desired degree of polymer stability, but a bioabsorbable polymer is probably more desirable since, unlike a biostable polymer, it will not be present long after implantation to cause any adverse, chronic local response. Bioabsorbable polymers that could be used include poly(L-lactic acid), polycaprolactone, poly(lactide-co-glycolide), poly(hydroxybutyrate), poly(hydroxybutyrate-co-valerate), polydioxanone, polyorthoester, polyanhydride, poly(glycolic acid), poly(D,L-lactic acid), poly(glycolic acid-co-trimethylene carbonate), polyphosphoester, polyphosphoester urethane, poly(amino acids), cyanoacrylates, poly(trimethylene carbonate), poly(iminocarbonate), copoly(ether-esters) (e.g. PEO/PLA), polyalkylene oxalates, polyphosphazenes and biomolecules such as fibrin, fibrinogen, cellulose, starch, collagen and hyaluronic acid. Also, biostable polymers with a relatively low chronic tissue response such as polyurethanes, silicones, and polyesters could be used and other polymers could also be used if they can be dissolved and cured or polymerized on the stent such as polyolefins, polyisobutylene and ethylene-alphaolefin copolymers; acrylic polymers and copolymers, vinyl halide polymers and copolymers, such as polyvinyl chloride; polyvinyl ethers, such as polyvinyl methyl ether; polyvinylidene halides, such as polyvinylidene fluoride and polyvinylidene chloride; polyacrylonitrile, polyvinyl ketones; polyvinyl aromatics, such as polystyrene, polyvinyl esters, such as polyvinyl acetate; copolymers of vinyl monomers with each other and olefins, such as ethylene-methyl methacrylate copolymers, acrylonitrile-styrene copolymers, ABS resins, and ethylene-vinyl acetate copolymers; polyamides, such as Nylon 66 and polycaprolactam; alkyd resins; polycarbonates; polyoxymethylenes; polyimides; polyethers; epoxy resins, polyurethanes; rayon; rayon-triacetate; cellulose, cellulose acetate, cellulose butyrate; cellulose acetate butyrate; cellophane; cellulose nitrate; cellulose propionate; cellulose ethers; and carboxymethyl cellulose. The ratio of therapeutic substance to polymer in the solution will depend on the efficacy of the polymer in securing the therapeutic substance onto the stent and the rate at which the coating is to release the therapeutic substance to the tissue of the blood vessel. More polymer may be needed if it has relatively poor efficacy in retaining the therapeutic substance on the stent and more polymer may be needed in order to provide an elution matrix that limits the elution of a very soluble therapeutic substance. A wide ratio of therapeutic substance to polymer could therefore be appropriate and could range from about 10:1 to about 1:100.”

[0505] By way of yet further illustration, and referring to U.S. Pat. No. 5,470,307 (the entire disclosure of which is hereby incorporated by reference into this specification), the polymeric material may a synthetic or natural polymer, such as polyamide, polyester, polyolefin (polypropylene or polyethylene), polyurethane, latex, acrylamide, methacrylate, polyvinylchloride, polysulfone, and the like; see, e.g., column 11 of the patent.

[0506] In one embodiment, the polymeric material is bound to the anti-mitotic compound by one or more photosensitive linkers. The process of preparing and binding these photosensitive linkers is described in columns 8-9 of U.S. Pat. No. 5,470,307, wherein it is disclosed that: “The process of fabricating a catheter 10 having a desired therapeutic agent 20 connected thereto and then controllably and selectively releasing that therapeutic agent 20 at a remote site within a patient may be summarized in five steps. 1. Formation of Substrate. The substrate layer 16 is formed on or applied to the surface 14 of the catheter body 12, and subsequently or simultaneously prepared for coupling to the linker layer 18. This is accomplished by modifying the substrate layer 16 to expose or add groups such as carboxyls, amines, hydroxyls, or sulfhydryls. In some cases, this may be followed by customizing the substrate layer 16 with an extender 22 that will change the functionality, for example by adding a maleimide group that will accept a Michael's addition of a sulfhydryl at one end of a bifunctional photolytic linker 18. The extent of this derivitization is measured by adding group-specific probes (such as 1 pyrenyl diazomethane for carboxyls, 1 pyrene butyl hydrazine for amines, or Edman's reagent for sulfhydryls Molecular Probes, Inc. of Eugene, Oreg. or Pierce Chemical of Rockford, III.) or other fluorescent dyes that may be measured optically or by flow cytometry. The substrate layer 16 can be built up to increase its capacity by several methods, examples of which are discussed below.”

[0507] As is also disclosed in U.S. Pat. No. 5,470,307, “2. Selection of Photolytic Release Mechanism. A heterobifunctional photolytic linker 18 suitable for the selected therapeutic agent d20 and designed to couple readily to the functionality of the substrate layer 16 is prepared, and may be connected to the substrate layer 16. Alternately, the photolinker 18 may first be bonded to the therapeutic agent 20, with the combined complex of the therapeutic agent 20 and photolytic linker 18 together being connected to the substrate layer 16. 3. Selection of the Therapeutic Agent. Selection of the appropriate therapeutic agent 20 for a particular clinical application will depend upon the prevailing medical practice. One representative example described below for current use in PTCA and PTA procedures involves the amine terminal end of a twelve amino acid peptide analogue of hirudin being coupled to a chloro carbonyl group on the photolytic linker 18. Another representative example is provided below where the therapeutic agent 20 is a nucleotide such as an antisense oligodeoxynucleotide where a terminal phosphate is bonded by means of a diazoethane located on the photolytic linker 18. A third representative example involves the platelet inhibitor dipyridamole (persantin) that is attached through an alkyl hydroxyl by means of a diazo ethane on the photolytic linker 18. 4. Fabrication of the Linker-Agent Complex and Attachment to the Substrate. The photolytic linker 18 or the photolytic linker 18 with the therapeutic agent 20 attached are connected to the substrate layer 16 to complete the catheter 10. A representative example is a photolytic linker 18 having a sulfhydryl disposed on the non-photolytic end for attachment to the substrate layer 16, in which case the coupling will occur readily in a neutral buffer solution to a maleimide-modified substrate layer 16 on the catheter 10. Once the therapeutic agent 20 has been attached to the catheter 10, it is necessary that the catheter 10 be handled in a manner that prevents damage to the substrate layer 16, photolytic linker layer 18, and therapeutic agent 20, which may include subsequent sterilization, protection from ambient light, heat, moisture, and other environmental conditions that would adversely affect the operation or integrity of the drug-delivery catheter system 10 when used to accomplish a specific medical procedure on a patient.”

[0508] In the process of U.S. Pat. No. 5,470,307, the linker is preferably bound to the polymeric material through a modified functional group. The preparation of such modified functional groups is discussed at columns 10-13 of such patent, wherein it is disclosed that: “Most polymers including those discussed herein can be made of materials which have modifiable functional groups or can be treated to expose such groups. Polyamide (nylon) can be modified by acid treatment to produce exposed amines and carboxyls. Polyethylene terephthalate (PET, Dacron®) is a polyester and can be chemically treated to expose hydroxyls and carboxyls. Polystyrene has an exposed phenyl group that can be derivitized. Polyethylene and polypropylene (collectively referred to as polyolefins) have simple carbon backbones which can be derivitized by treatment with chromic and nitric acids to produce carboxyl functionality, photocoupling with suitably modified benzophenones, or by plasma grafting of selected monomers to produce the desired chemical functionality. For example, grafting of acrylic acid will produce a surface with a high concentration of carboxyl groups, whereas thiophene or 1,6 diaminocyclohexane will produce a surface containing sulfhydryls or amines, respectively. The surface functionality can be modified after grafting of a monomer by addition of other functional groups. For example, a carboxyl surface can be changed to an amine by coupling 1,6 diamino hexane, or to a sulfhydryl surface by coupling mercapto ethyl amine.”

[0509] As is also disclosed in U.S. Pat. No. 5,470,307, “Acrylic acid can be polymerized onto latex, polypropylene, polysulfone, and polyethylene terephthalate (PET) surfaces by plasma treatment. When measured by toludine blue dye binding, these surfaces show intense modification. On polypropylene microporous surfaces modified by acrylic acid, as much as 50 nanomoles of dye binding per cm2 of external surface area can be found to represent carboxylated surface area. Protein can be linked to such surfaces using carbonyl diimidazole (CDI) in tetrahydrofuran as a coupling system, with a resultant concentration of one nanomole or more per cm2 of external surface. For a 50,000 Dalton protein, this corresponds to 50 μg per cm2, which is far above the concentration expected with simple plating on the surface. Such concentrations of an anti-mitotic compound 20 on the angioplasty (PTCA) balloon of a catheter 10, when released, would produce a high concentration of that therapeutic agent 20 at the site of an expanded coronary artery. However, plasma-modified surfaces are difficult to control and leave other oxygenated carbons that may cause undesired secondary reactions”

[0510] As is also disclosed in U.S. Pat. No. 5,470,307, “In the case of balloon dilation catheters 10, creating a catheter body 12 capable of supporting a substrate layer 16 with enhanced surface area can be done by several means known to the art including altering conditions during balloon spinning, doping with appropriate monomers, applying secondary coatings such as polyethylene oxide hydrogel, branched polylysines, or one of the various Starburst™. dendrimers offered by the Aldrich Chemical Company of Milwaukee, Wis.”

[0511] As is also disclosed in U.S. Pat. No. 5,470,307, “The most likely materials for the substrate layer 16 in the case of a dilation balloon catheter 10 or similar apparatus are shown in FIGS. 1a-1g, including synthetic or natural polymers such as polyamide, polyester, polyolefin (polypropylene or polyethylene), polyurethane, and latex. For solid support catheter bodies 12, usable plastics might include acrylamides, methacrylates, urethanes, polyvinylchloride, polysulfone, or other materials such as glass or quartz, which are all for the most part derivitizable.” In one embodiment, depicted in FIG. 1A, the photosensitive linker is bonded to a plastic container 12.

[0512] As is also disclosed in U.S. Pat. No. 5,470,307, “Referring to the polymers shown in FIGS. 1a-1g, polyamide (nylon) is treated with 3-5M hydrochloric acid to expose amines and carboxyl groups using conventional procedures developed for enzyme coupling to nylon tubing. A further description of this process may be obtained from Inman, D. J. and Hornby, W. E., The Iramobilization of Enzymes on Nylon Structures and their Use in Automated Analysis, Biochem. J. 129:255-262 (1972) and Daka, N. J. and Laidler, Flow kinetics of lactate dehydrogenase chemically attached to nylon tubing, K. J., Can. J. Biochem. 56:774-779 (1978). This process will release primary amines and carboxyls. The primary amine group can be used directly, or succinimidyl 4 (p-maleimidophenyl) butyrate (SMBP) can be coupled to the amine function leaving free the maleimide to couple with a sulfhydryl on several of the photolytic linkers 18 described below and acting as an extender 22. If needed, the carboxyl released can also be converted to an amine by first protecting the amines with BOC groups and then coupling a diamine to the carboxyl by means of carbonyl diimidazole (CDI).” The polymeric material 14, and/or the container 12, may comprise or consist essentially of nylon.

[0513] As is also disclosed in U.S. Pat. No. 5,470,307, “Polyester (Dacron®) can be functionalized using 0.01 N NaOH in 10% ethanol to release hydroxyl and carboxyl groups in the manner described by Blassberger, D. et al, Chemically Modified Polyesters as Supports for Enzyme Iramobilization: Isocyanide, Acylhydrazine, and Aminoaryl derivatives of Poly(ethylene Terephthalate), Biotechnol. and Bioeng. 20:309-315 (1978). A diamine is added directly to the etched surface using CDI and then reacted with SMBP to yield the same maleimide reacting group to accept the photolytic linker 18.” The polymeric material 14, and/or the container 12, may comprise or consist essentially of polyester.”

[0514] As is also disclosed in U.S. Pat. No. 5,470,307, “Polystyrene can be modified many ways, however perhaps the most useful process is chloromethylation, as originally described by Merrifield, R. B., Solid Phase Synthesis. I. The Synthesis of a Tetrapeptide, J. Am. Chem Soc. 85:2149-2154 (1963), and later discussed by Atherton, E. and Sheppard, R. C., Solid Phase Peptide Synthesis: A Practical Approach, pp. 13-23, (IRL Press 1989). The chlorine can be modified to an amine by reaction with anhydrous ammonia.” The polymeric material may be comprised of or consist essentially of polystyrene.

[0515] As is also disclosed in U.S. Pat. No. 5,470,307, “Polyolefins (polypropylene or polyethylene) require different approaches because they contain primarily a carbon backbone offering no native functional groups. One suitable approach is to add carboxyls to the surface by oxidizing with chromic acid followed by nitric acid as described by Ngo, T. T. et al., Kinetics of acetylcholinesterase immobilized on polyethylene tubing, Can. J. Biochem. 57:1200-1203 (1979). These carboxyls are then converted to amines by reacting successively with thionyl chloride and ethylene diamine. The surface is then reacted with SMBP to produce a maleimide that will react with the sulfhydryl on the photolytic linker 18.” The polymeric material may be comprised of or consist essentially of polyolefin material.

[0516] As is also disclosed in U.S. Pat. No. 5,470,307, “A more direct method is to react the polyolefin surfaces with benzophenone 4-maleimide as described by Odom, O. W. et al, Relaxation Time, Interthiol Distance, and Mechanism of Action of Ribosomal Protein S1, Arch. Biochem Biophys. 230:178-193 (1984), to produce the required group for the sulfhydryl addition to the photolytic linker 18. The benzophenone then links to the polyolefin through exposure to ultraviolet (uv) light. Other methods to derivitize the polyolefin surface include the use of radio frequency glow discharge (RFGD)—also known as plasma discharge—in several different manners to produce an in-depth coating to provide functional groups as well as increasing the effective surface area. Polyethylene oxide (PEO) can be crosslinked to the surface, or polyethylene glycol (PEG) can also be used and the mesh varied by the size of the PEO or PEG. This is discussed more fully by Sheu, M. S., et al., A glow discharge treatment to immobilize poly(ethylene oxide)/poly(propylene oxide) surfactants for wettable and non-fouling biomaterials, J. Adhes. Sci. Tech., 6:995-1009 (1992) and Yasuda, H., Plasma Polymerization, (Academic Press, Inc. 1985). Exposed hydroxyls can be activated by tresylation, also known as trifluoroethyl sulfonyl chloride activation, in the manner described by Nielson, K. and Mosbach, K., Tresyl Chloride-Activated Supports for Enzyme Immobilization (and related articles), Meth. Enzym., 135:65-170 (1987). The function can be converted to amines by addition of ethylene diamine or other aliphatic diamines, and then the usual addition of SMBP will give the required maleimide. Another suitable method is to use RFGD to polymerize acrylic acid or other monomers on the surface of the polyolefin. This surface consisting of carboxyls and other carbonyls is derivitizable with CDI and a diamine to give an amine surface which then can react with SMBP.”

[0517] Referring again to the process described in U.S. Pat. No. 5,470,307, photolytic linkers can be conjugated to the functional groups on substrate layers to form linker-agent complexes. As is disclosed in columns 13-14 of such patent, “Once a particular functionality for the substrate layer 16 has been determined, the appropriate strategy for coupling the photolytic linker 18 can be selected and employed. Several such strategies are set out in the examples which follow. As with selecting a method to expose a functional group on the surface 14 of the substrate layer 16, it is understood that selection of the appropriate strategy for coupling the photolytic linker 18 will depend upon various considerations including the chemical functionality of the substrate layer 16, the particular therapeutic agent 20 to be used, the chemical and physical factors affecting the rate and equilibrium of the particular photolytic release mechanism, the need to minimize any deleterious side-effects that might result (such as the production of antagonistic or harmful chemical biproducts, secondary chemical reactions with adjunct medical instruments including other portions of the catheter 10, unclean leaving groups or other impurities), and the solubility of the material used to fabricate the catheter body 12 or substrate layer 16 in various solvents. More limited strategies are available for the coupling of a 2-nitrophenyl photolytic linker 18. If the active site is 1-ethyl hydrazine used in most caging applications, then the complementary functionality on the therapeutic agent 20 will be a carboxyl, hydroxyl, or phosphate available on many pharmaceutical drugs. If a bromomethyl group is built into the photolytic linker 18, it can accept either a carboxyl or one of many other functional groups, or be converted to an amine which can then be further derivitized. In such a case, the leaving group might not be clean and care must be taken when adopting this strategy for a particular anti-mitotic compound 20. Other strategies include building in an oxycarbonyl in the 1-ethyl position, which can form an urethane with an amine in the anti-mitotic compound 20. In this case, the photolytic process evolves CO2.”

[0518] Referring again to U.S. Pat. No. 5,470,307, after the photolytic linker construct has been prepared, it may be contacted with a coherent laser light source to release the therapeutic agent. Thus, as is disclosed in column 9 of U.S. Pat. No. 5,470,307, “use of a coherent laser light source 26 will be preferable in many applications because the use of one or more discrete wavelengths of light energy that can be tuned or adjusted to the particular photolytic reaction occurring in the photolytic linker 18 will necessitate only the minimum power (wattage) level necessary to accomplish a desired release of the anti-mitotic compound 20. As discussed above, coherent or laser light sources 26 are currently used in a variety of medical procedures including diagnostic and interventional treatment, and the wide availability of laser sources 26 and the potential for redundant use of the same laser source 26 in photolytic release of the therapeutic agent 20 as well as related procedures provides a significant advantage. In addition, multiple releases of different therapeutic agents 20 or multiple-step reactions can be accomplished using coherent light of different wavelengths, intermediate linkages to dye filters may be utilized to screen out or block transmission of light energy at unused or antagonistic wavelengths (particularly cytotoxic or cytogenic wavelengths), and secondary emitters may be utilized to optimize the light energy at the principle wavelength of the laser source 26. In other applications, it may be suitable to use a light source 26 such as a flash lamp operatively connected to the portion of the body 12 of the catheter 10 on which the substrate 16, photolytic linker layer 18, and anti-mitotic compound 20 are disposed. One example would be a mercury flash lamp capable of producing long-wave ultra-violet (uv) radiation within or across the 300-400 nanometer wavelength spectrum. When using either a coherent laser light source 26 or an alternate source 26 such as a flash lamp, it is generally preferred that the light energy be transmitted through at least a portion of the body 12 of the catheter 10 such that the light energy traverses a path through the substrate layer 16 to the photolytic linker layer 18 in order to maximize the proportion of light energy transmitted to the photolytic linker layer 18 and provide the greatest uniformity and reproducibility in the amount of light energy (photons) reaching the photolytic linker layer 18 from a specified direction and nature. Optimal uniformity and reproducibility in exposure of the photolyric linker layer 18 permits advanced techniques such as variable release of the anti-mitotic compound 20 dependent upon the controlled quantity of light energy incident on the substrate layer 16 and photolytic linker layer 18.”

[0519] As is also disclosed in U.S. Pat. No. 5,470,307, “The art pertaining to the transmission of light energy through fiber optic conduits 28 or other suitable transmission or production means to the remote biophysical site is extensively developed. For a fiber optic device, the fiber optic conduit 28 material must be selected to accommodate the wavelengths needed to achieve release of the anti-mitotic compound 20 which will for almost all applications be within the range of 280-400 nanometers. Suitable fiber optic materials, connections, and light energy sources 26 may be selected from those currently available and utilized within the biomedical field. While fiber optic conduit 28 materials may be selected to optimize transmission of light energy at certain selected wavelengths for desired application, the construction of a catheter 10 including fiber optic conduit 28 materials capable of adequate transmission throughout the range of the range of 280-400 nanometers is preferred, since this catheter 10 would be usable with the full compliment of photolytic release mechanisms and therapeutic agents 10. Fabrication of the catheter 10 will therefore depend more upon considerations involving the biomedical application or procedure by which the catheter 10 will be introduced or implanted in the patient, and any adjunct capabilities which the catheter 10 must possess.”

[0520] By way of yet further illustration, and referring to U.S. Pat. No. 5,599,352 (the entire disclosure of which is hereby incorporated by reference into this specification), the polymeric material can comprise fibrin. As is disclosed in column 4 of such patent, “The present invention provides a stent comprising fibrin. The term “fibrin” herein means the naturally occurring polymer of fibrinogen that arises during blood coagulation. Blood coagulation generally requires the participation of several plasma protein coagulation factors: factors XII, XI, IX, X, VIII, VII, V, XIII, prothrombin, and fibrinogen, in addition to tissue factor (factor III), kallikrein, high molecular weight kininogen, Ca+2, and phospholipid. The final event is the formation of an insoluble, cross-linked polymer, fibrin, generated by the action of thrombin on fibrinogen. Fibrinogen has three pairs of polypeptide chains (ALPHA 2-BETA 2-GAMMA 2) covalently linked by disulfide bonds with a total molecular weight of about 340,000. Fibrinogen is converted to fibrin through proteolysis by thrombin. An activation peptide, fibrinopeptide A (human) is cleaved from the amino-terminus of each ALPHA chain; fibrinopeptide B (human) from the amino-terminus of each BETA chain. The resulting monomer spontaneously polymerizes to a fibrin gel. Further stabilization of the fibrin polymer to an insoluble, mechanically strong form, requires cross-linking by factor XIII. Factor XIII is converted to XIIIa by thrombin in the presence of Ca+2. XIIIa cross-links the GAMMA chains of fibrin by transglutaminase activity, forming EPSILON-(GAMMA-glutamyl) lysine cross-links. The ALPHA chains of fibrin also may be secondarily cross-linked by transamidation.”

[0521] As is also disclosed in U.S. Pat. No. 5,599,352, “Since fibrin blood clots are naturally subject to fibrinolysis as part of the body's repair mechanism, implanted fibrin can be rapidly biodegraded. Plasminogen is a circulating plasma protein that is adsorbed onto the surface of the fibrin polymer. The adsorbed plasminogen is converted to plasmin by plasminogen activator released from the vascular endothelium. The plasmin will then break down the fibrin into a collection of soluble peptide fragments.”

[0522] As is also disclosed in U.S. Pat. No. 5,599,352, “Methods for making fibrin and forming it into implantable devices are well known as set forth in the following patents and published applications which are hereby incorporated by reference. In U.S. Pat. No. 4,548,736 issued to Muller et al., fibrin is clotted by contacting fibrinogen with a fibrinogen-coagulating protein such as thrombin, reptilase or ancrod. Preferably, the fibrin in the fibrin-containing stent of the present invention has Factor XIII and calcium present during clotting, as described in U.S. Pat. No. 3,523,807 issued to Gerendas, or as described in published European Patent Application 0366564, in order to improve the mechanical properties and biostability of the implanted device. Also preferably, the fibrinogen and thrombin used to make fibrin in the present invention are from the same animal or human species as that in which the stent of the present invention will be implanted in order to avoid cross-species immune reactions. The resulting fibrin can also be subjected to heat treatment at about 150° C. for 2 hours in order to reduce or eliminate antigenicity. In the Muller patent, the fibrin product is in the form of a fine fibrin film produced by casting the combined fibrinogen and thrombin in a film and then removing moisture from the film osmotically through a moisture permeable membrane. In the European Patent Application 0366564, a substrate (preferably having high porosity or high affinity for either thrombin or fibrinogen) is contacted with a fibrinogen solution and with a thrombin solution. The result is a fibrin layer formed by polymerization of fibrinogen on the surface of the device. Multiple layers of fibrin applied by this method could provide a fibrin layer of any desired thickness. Or, as in the Gerendas patent, the fibrin can first be clotted and then ground into a powder which is mixed with water and stamped into a desired shape in a heated mold. Increased stability can also be achieved in the shaped fibrin by contacting the fibrin with a fixing agent such as glutaraldehyde or formaldehyde. These and other methods known by those skilled in the art for making and forming fibrin may be used in the present invention.”

[0523] As is also disclosed in U.S. Pat. No. 5,599,352, “Preferably, the fibrinogen used to make the fibrin is a bacteria-free and virus-free fibrinogen such as that described in U.S. Pat. No. 4,540,573 to Neurath et al which is hereby incorporated by reference. The fibrinogen is used in solution with a concentration between about 10 and 50 mg/ml and with a pH of about 5.8-9.0 and with an ionic strength of about 0.05 to 0.45. The fibrinogen solution also typically contains proteins and enzymes such as albumin, fibronectin (0-300 μg per ml fibrinogen), Factor XIII (0-20 μg per ml fibrinogen), plasminogen (0-210 μg per ml fibrinogen), antiplasmin (0-61 μg per ml fibrinogen) and Antithrombin III (0-150 μg per ml fibrinogen). The thrombin solution added to make the fibrin is typically at a concentration of 1 to 120 NIH units/ml with a preferred concentration of calcium ions between about 0.02 and 0.2M.”

[0524] As is also disclosed in U.S. Pat. No. 5,599,352, “Polymeric materials can also be intermixed in a blend or co-polymer with the fibrin to produce a material with the desired properties of fibrin with improved structural strength. For example, the polyurethane material described in the article by Soldani et at., “Bioartificial Polymeric Materials Obtained from Blends of Synthetic Polymers with Fibrin and Collagen” International Journal of Artificial Organs, Vol. 14, No. 5, 1991, which is incorporated herein by reference, could be sprayed onto a suitable stent structure. Suitable polymers could also be biodegradable polymers such as polyphosphate ester, polyhydroxybutyrate valerate, polyhydroxybutyrate-co-hydroxyvalerate and the like . . . ” The polymeric material 14 may be, e.g., a blend of fibrin and another polymeric material.

[0525] As is also disclosed in U.S. Pat. No. 5,599,352, “The shape for the fibrin can be provided by molding processes. For example, the mixture can be formed into a stent having essentially the same shape as the stent shown in U.S. Pat. No. 4,886,062 issued to Wiktor. Unlike the method for making the stent disclosed in Wiktor which is wound from a wire, the stent made with fibrin can be directly molded into the desired open-ended tubular shape.”

[0526] As is also disclosed in U.S. Pat. No. 5,599,352, “In U.S. Pat. No. 4,548,736 issued to Muller et al., a dense fibrin composition is disclosed which can be a bioabsorbable matrix for delivery of drugs to a patient. Such a fibrin composition can also be used in the present invention by incorporating a drug or other therapeutic substance useful in diagnosis or treatment of body lumens to the fibrin provided on the stent. The drug, fibrin and stent can then be delivered to the portion of the body lumen to be treated where the drug may elute to affect the course of restenosis in surrounding luminal tissue. Examples of drugs that are thought to be useful in the treatment of restenosis are disclosed in published international patent application WO9112779 “Intraluminal Drug Eluting Prosthesis” which is incorporated herein by reference. Therefore, useful drugs for treatment of restenosis and drugs that can be incorporated in the fibrin and used in the present invention can include drugs such as anticoagulant drugs, antiplatelet drugs, antimetabolite drugs, anti-inflammatory drugs and antimitotic drugs. Further, other vasoreactive agents such as nitric oxide releasing agents could also be used. Such therapeutic substances can also be microencapsulated prior to their inclusion in the fibrin. The micro-capsules then control the rate at which the therapeutic substance is provided to the blood stream or the body lumen. This avoids the necessity for dehydrating the fibrin as set forth in Muller et al., since a dense fibrin structure would not be required to contain the therapeutic substance and limit the rate of delivery from the fibrin. For example, a suitable fibrin matrix for drug delivery can be made by adjusting the pH of the fibrinogen to below about pH 6.7 in a saline solution to prevent precipitation (e.g., NACl, CaCl, etc.), adding the microcapsules, treating the fibrinogen with thrombin and mechanically compressing the resulting fibrin into a thin film. The microcapsules which are suitable for use in this invention are well known. For example, the disclosures of U.S. Pat. Nos. 4,897,268, 4,675,189; 4,542,025; 4,530,840; 4,389,330; 4,622,244; 4,464,317; and 4,943,449 could be used and are incorporated herein by reference. Alternatively, in a method similar to that disclosed in U.S. Pat. No. 4,548,736 issued to Muller et al., a dense fibrin composition suitable for drug delivery can be made without the use of microcapsules by adding the drug directly to the fibrin followed by compression of the fibrin into a sufficiently dense matrix that a desired elution rate for the drug is achieved. In yet another method for incorporating drugs which allows the drug to elute at a controlled rate, a solution which includes a solvent, a polymer dissolved in the solvent and a therapeutic drug dispersed in the solvent is applied to the structural elements of the stent and then the solvent is evaporated. Fibrin can then be added over the coated structural elements in an adherent layer. The inclusion of a polymer in intimate contact with a drug on the underlying stent structure allows the drug to be retained on the stent in a resilient matrix during expansion of the stent and also slows the administration of drug following implantation. The method can be applied whether the stent has a metallic or polymeric surface. The method is also an extremely simple method since it can be applied by simply immersing the stent into the solution or by spraying the solution onto the stent. The amount of drug to be included on the stent can be readily controlled by applying multiple thin coats of the solution while allowing it to dry between coats. The overall coating should be thin enough so that it will not significantly increase the profile of the stent for intravascular delivery by catheter. It is therefore preferably less than about 0.002 inch thick and most preferably less than 0.001 inch thick. The adhesion of the coating and the rate at which the drug is delivered can be controlled by the selection of an appropriate bioabsorbable or biostable polymer and by the ratio of drug to polymer in the solution. By this method, drugs such as glucocorticoids (e.g. dexamethasone, betamethasone), heparin, hirudin, tocopherol, angiopeptin, aspirin, ACE inhibitors, growth factors, oligonucleotides, and, more generally, antiplatelet agents, anticoagulant agents, antimitotic agents, antioxidants, antimetabolite agents, and anti-inflammatory agents can be applied to a stent, retained on a stent during expansion of the stent and elute the drug at a controlled rate. The release rate can be further controlled by varying the ratio of drug to polymer in the multiple layers. For example, a higher drug-to-polymer ratio in the outer layers than in the inner layers would result in a higher early dose which would decrease over time. Examples of some suitable combinations of polymer, solvent and therapeutic substance are set forth in Table 1 below . . . .”

[0527] At column 7 of U.S. Pat. No. 5,599,352, some polymers that can be mixed with the fibrin are discussed. It is disclosed that: “The polymer used can be a bioabsorbable or biostable polymer. Suitable bioabsorbable polymers include poly(L-lactic acid), poly(lactide-co-glycolide) and poly(hydroxybutyrate-co-valerate). Suitable biostable polymers include silicones, polyurethanes, polyesters, vinyl homopolymers and copolymers, acrylate homopolymers and copolymers, polyethers and cellulosics. A typical ratio of drug to dissolved polymer in the solution can vary widely (e.g. in the range of about 10:1 to 1:100). The fibrin is applied by molding a polymerization mixture of fibrinogen and thrombin onto the composite as described herein.” The polymeric material 14 may be, e.g., a blend of fibrin and a bioabsorbable and/or biostable polymer.

[0528] By way of yet further illustration, and referring to U.S. Pat. No. 5,605,696, the polymeric material can be a multi-layered polymeric material, and/or a porous polymeric material. Thus, e.g., and as is disclosed in claim 25 of such patent, “A polymeric material containing a therapeutic drug for application to an intravascular stent for carrying and delivering said therapeutic drug within a blood vessel in which said intravascular stent is placed, comprising: a polymeric material having a thermal processing temperature no greater than about 100° C.; particles of a therapeutic drug incorporated in said polymeric material; and a porosigen uniformly dispersed in said polymeric material, said porosigen being selected from the group consisting of sodium chloride, lactose, sodium heparin, polyethylene glycol, copolymers of polyethylene oxide and polypropylene oxide, and mixtures thereof.”The “porsigen” is described at columns 4 and 5 of the patent, wherein it is disclosed that: “porosigen can also be incorporated in the drug loaded polymer by adding the porosigen to the polymer along with the therapeutic drug to form a porous, drug loaded polymeric membrane. A porosigen is defined herein for purposes of this application as any moiety, such as microgranules of sodium chloride, lactose, or sodium heparin, for example, Which will dissolve or otherwise be degraded when immersed in body fluids to leave behind a porous network in the polymeric material. The pores left by such porosigens can typically be a large as 10 microns. The pores formed by porosigens such as polyethylene glycol (PEG), polyethylene oxide/polypropylene oxide (PEO/PPO) copolymers, for example, can also be smaller than one micron, although other similar materials which form phase separations from the continuous drug loaded polymeric matrix and can later be leached out by body fluids can also be suitable for forming pores smaller than one micron. While it is currently preferred to apply the polymeric material to the structure of a stent while the therapeutic drug and porosigen material are contained within the polymeric material, to allow the porosigen to be dissolved or degraded by body fluids when the stent is placed in a blood vessel, alternatively the porosigen can be dissolved and removed from the polymeric material to form pores in the polymeric material prior to placement of the polymeric material combined with the stent within a blood vessel. If desired, a rate-controlling membrane can also be applied over the drug loaded polymer, to limit the release rate of the therapeutic drug. Such a rate-controlling membrane can be useful for delivery of water soluble substances where a nonporous polymer film would completely prevent diffusion of the drug. The rate-controlling membrane can be added by applying a coating from a solution, or a lamination, as described previously. The rate-controlling membrane applied over the polymeric material can be formed to include a uniform dispersion of a porosigen in the rate-controlling membrane, and the porosigen in the rate-controlling membrane can be dissolved to leave pores in the rate-controlling membrane typically as large as 10 microns, or as small as 1 micron, for example, although the pores can also be smaller than 1 micron. The porosigen in the rate-controlling membrane can be, for example, sodium chloride, lactose, sodium heparin, polyethylene glycol, polyethylene oxide/polypropylene oxide copolymers, and mixtures thereof.” The polymeric material 14 may comprise a multiplicity of layers of polymeric material.

[0529] By way of yet further illustration, and referring to U.S. Pat. No. 5,700,286 (the entire disclosure of which is hereby incorporated by reference into this specification), the polymeric material may be either a thermoplastic or an elastomeric polymer. Thus, and referring to columns 5 and 6 of such patent, “The polymeric material is preferably selected from thermoplastic and elastomeric polymers. In one currently preferred embodiment the polymeric material can be a material available under the trade name “C-Flex” from Concept Polymer Technologies of Largo, Fla. In another currently preferred embodiment, the polymeric material can be ethylene vinyl acetate (EVA); and in yet another currently preferred embodiment, the polymeric material can be a material available under the trade name “BIOSPAN.” Other suitable polymeric materials include latexes, urethanes, polysiloxanes, and modified styrene-ethylene/butylene-styrene block copolymers (SEBS) and their associated families, as well as elastomeric, bioabsorbable, linear aliphatic polyesters. The polymeric material can typically have a thickness in the range of about 0.002 to about 0.020 inches, for example. The polymeric material is preferably bioabsorbable, and is preferably loaded or coated with a anti-mitotic compound or drug, including, but not limited to, antiplatelets, antithrombins, cytostatic and antiproliferative agents, for example, to reduce or prevent restenosis in the vessel being treated.”

[0530] By way of yet further illustration, and referring to U.S. Pat. No. 6,004,346 (the entire disclosure of which is hereby incorporated by reference into this specification), the polymeric material may be a bioabsorbable polymer. Thus, and referring to column 7 of such patent, “controlled release, via a bioabsorbable polymer, offers to maintain the drug level within the desired therapeutic range for the duration of the treatment. In the case of stents, the prosthesis materials will maintain vessel support for at least two weeks or until incorporated into the vessel wall even with bioabsorbable, biodegradable polymer constructions.”

[0531] As is also disclosed in U.S. Pat. No. 6,004,346 “Several polymeric compounds that are known to be bioabsorbable and hypothetically have the ability to be drug impregnated may be useful in prosthesis formation herein. These compounds include: poly-1-lactic acid/polyglycolic acid, polyanhydride, and polyphosphate ester. A brief description of each is given below.”

[0532] As is also disclosed in U.S. Pat. No. 6,004,346, “Poly-1-lactic acid/polyglycolic acid has been used for many years in the area of bioabsorbable sutures. It is currently available in many forms, i.e., crystals, fibers, blocks, plates, etc . . . ”

[0533] As is also disclosed in U.S. Pat. No. 6,004,346, “Another compound which could be used are the polyanhydrides. They are currently being used with several chemotherapy drugs for the treatment of cancerous tumors. These drugs are compounded into the polymer which is molded into a cube-like structure and surgically implanted at the tumor site . . . ”

[0534] As is also disclosed in U.S. Pat. No. 6,004,346, “The compound which is preferred is a polyphosphate ester. Polyphosphate ester is a compound such as that disclosed in U.S. Pat. Nos. 5,176,907; 5,194,581; and 5,656,765 issued to Leong which are incorporated herein by reference. Similar to the polyanhydrides, polyphosphate ester is being researched for the sole purpose of drug delivery. Unlike the polyanhydrides, the polyphosphate esters have high molecular weights (600,000 average), yielding attractive mechanical properties. This high molecular weight leads to transparency, and film and fiber properties. It has also been observed that the phosphorous-carbon-oxygen plasticizing effect, which lowers the glass transition temperature, makes the polymer desirable for fabrication.”

[0535] As is also disclosed in U.S. Pat. No. 6,004,346, “The basic structure of polyphosphate ester monomer is shown below . . . where P corresponds to Phosphorous, O corresponds to Oxygen, and R and R1 are functional groups. Reaction with water leads to the breakdown of this compound into monomeric phosphates (phosphoric acid) and diols (see below). [Figure] It is the hydrolytic instability of the phosphorous ester bond which makes this polymer attractive for controlled drug release applications. A wide range of controllable degradation rates can be obtained by adjusting the hydrophobicities of the backbones of the polymers and yet assure biodegradability. The functional side groups allow for the chemical linkage of drug molecules to the polymer. the drug may also be incorporated into the backbone of the polymer.”

[0536] By way of further illustration, and referring to U.S. Pat. No. 6,120,536 (the entire disclosure of which is hereby incorporated by reference into this specification), the polymeric material may comprise a hydrophobic elastomeric material incorporating an amount of anti-mitotic compound therein for timed release. Some of these elastomeric materials are described at columns 5 and 6 of such patent, wherein it is disclosed that: “The elastomeric materials that form the stent coating underlayers should possess certain properties. Preferably the layers should be of suitable hydrophobic biostable elastomeric materials which do not degrade. Surface layer material should minimize tissue rejection and tissue inflammation and permit encapsulation by tissue adjacent the stent implantation site. Exposed material is designed to reduce clotting tendencies in blood contacted and the surface is preferably modified accordingly. Thus, underlayers of the above materials are preferably provided with a fluorosilicone outer coating layer which may or may not contain imbedded bioactive material, such as heparin. Alternatively, the outer coating may consist essentially of polyethylene glycol (PEG), polysaccharides, phospholipids, or combinations of the foregoing.”

[0537] As is also disclosed in U.S. Pat. No. 6,120,536 “Polymers generally suitable for the undercoats or underlayers include silicones (e.g., polysiloxanes and substituted polysiloxanes), polyurethanes, thermoplastic elastomers in general, ethylene vinyl acetate copolymers, polyolefin elastomers, polyamide elastomers, and EPDM rubbers. The above-referenced materials are considered hydrophobic with respect to the contemplated environment of the invention. Surface layer materials include fluorosilicones and polyethylene glycol (PEG), polysaccharides, phospholipids, and combinations of the foregoing.”

[0538] As is also disclosed in U.S. Pat. No. 6,120,536, “Various combinations of polymer coating materials can be coordinated with biologically active species of interest to produce desired effects when coated on stents to be implanted in accordance with the invention. Loadings of therapeutic materials may vary. The mechanism of incorporation of the biologically active species into the surface coating and egress mechanism depend both on the nature of the surface coating polymer and the material to be incorporated. The mechanism of release also depends on the mode of incorporation. The material may elute via interparticle paths or be administered via transport or diffusion through the encapsulating material itself.”

[0539] By way of yet further illustration, and referring to U.S. Pat. No. 6,159,488 (the entire disclosure of which is hereby incorporated by reference into this specification), the polymeric material may be a biopolymer that is non-degradable and is insoluble in biological mediums. Thus, and as is disclosed at column 8 of this patent, “The polymer carrier can be any pharmaceutically acceptable biopolymer that is non-degradable and insoluble in biological mediums, has good stability in a biological environment, has a good adherence to the selected stent, is flexible, and that can be applied as coating to the surface of a stent, either from an organic solvent, or by a melt process. The hydrophilicity or hydrophobicity of the polymer carrier will determine the release rate of halofuginone from the stent surface . . . The coating may include other antiproliferative agents, such as heparin, steroids and non-steroidal anti-inflammatory agents. To improve the blood compatibility of the coated stent, a hydrophilic coating such as hydromer-hydrophilic polyurethane can be applied. A material for delivering a biologically active compound comprising a solid carrier material having dissolved and/or dispersed therein at least two biologically active compounds, each of said at least two biologically active compounds having a biologically active nucleus which is common to each of the biologically active compounds, and the at least two biologically active compounds having maximum solubility levels in a single solvent which differ from each other by at least 10% by weight; wherein said solid carrier comprises a biocompatible polymeric material.”

[0540] By way of yet further illustration, and referring to claim 1 of U.S. Pat. No. 6,168,801 (the entire disclosure of which is hereby incorporated by reference into this specification), the polymeric material may comprise “A material for delivering a biologically active compound comprising a solid carrier material having dissolved and/or dispersed therein at least two biologically active compounds, each of said at least two biologically active compounds having a biologically active nucleus which is common to each of the biologically active compounds, and the at least two biologically active compounds having maximum solubility levels in a single solvent which differ from each other by at least 10% by weight; wherein said solid carrier comprises a biocompatible polymeric material.”

[0541] The device of U.S. Pat. No. 6,168,801 preferably comprises at least two forms of a biologically active ingredient in a single polymeric matrix. Thus, and as is disclosed at column 6 of the patent, “It is contemplated in the practice of the present invention that the combination of the at least two forms of the biologically active ingredient or medically active ingredient in at least a single polymeric carrier can provide release of the active ingredient nucleus common to the at least two forms. The release of the active nucleus can be accomplished by, for example, enzymatic hydrolysis of the forms upon release from the carrier device. Further, the combination of the at least two forms of the biologically active ingredient or medically active ingredient in at least a single polymeric carrier can provide net active ingredient release characterized by the at least simple combination of the two matrix forms described above. This point is illustrated in FIG. 1 which compares the in vitro release of dexamethasone from matrices containing various fractions of two forms of the synthetic steroid dexamethasone, dexamethasone sodium phosphate (DSP; hydrophilic) and dexamethasone acetate (DA; hydrophobic). It is easy to see from these results that the release of dexamethasone acetate (specifically, 100% DA) is slower than all other matrices tested containing some degree or loading of dexamethasone sodium phosphate (hydrophilic). Still further, the resulting active ingredient release from the combined form matrix should be at least more rapid in the early stages of release than the slow single active ingredient component alone. Further still, the cumulative active ingredient release from the combined form matrix should be at least greater in the chronic stages than the fast single active ingredient component. Once again from FIG. 1, the two test matrices containing the greatest amount of dexamethasone sodium phosphate (specifically, 100% DSP, and 75% DSP/25% DA) began to slow in release as pointed out at points “A” and “B”. And further still, the optimal therapeutic release can be designed through appropriate combination of the at least two active biological or medical ingredients in the polymeric carrier material. If as in this example, rapid initial release as well as continuous long term release is desired to achieve a therapeutic goal, the matrix composed of 50% DSP/50% DA would be selected.”

[0542] By way of yet further illustration, and referring to claim 1 of U.S. Pat. No. 6,395,300 (the entire disclosure of which is hereby incorporated by reference into this specification), the polymeric material may be a porous polymeric matrix made by a process comprising the steps of: “a) dissolving a drug in a volatile organic solvent to form a drug solution, (b) combining at least one volatile pore forming agent with the volatile organic drug solution to form an emulsion, suspension, or second solution, and (c) removing the volatile organic solvent and volatile pore forming agent from the emulsion, suspension, or second solution to yield the porous matrix comprising drug, wherein the porous matrix comprising drug has a tap density of less than or equal to 1.0 g/mL or a total surface area of greater than or equal to 0.2 m2/g.”

[0543] The anti-mitotic compound may be derived from an anti-microtuble agent. As is disclosed in U.S. Pat. No. 6,689,803 (at columns 5-6), representative anti-microtubule agents include, e.g., “ . . . taxanes (e.g., paclitaxel and docetaxel), campothecin, eleutherobin, sarcodictyins, epothilones A and B, discodermolide, deuterium oxide (D2O), hexylene glycol (2-methyl-2,4-pentanediol), tubercidin (7-deazaadenosine), LY290181 (2-amino-4-(3-pyridyl)-4H-naphtho(1,2-b)pyran-3-cardonitrile), aluminum fluoride, ethylene glycol bis-(succinimidylsuccinate), glycine ethyl ester, nocodazole, cytochalasin B, colchicine, colcemid, podophyllotoxin, benomyl, oryzalin, majusculamide C, demecolcine, methyl-2-benzimidazolecarbamate (MBC), LY195448, subtilisin, 1069C85, steganacin, combretastatin, curacin, estradiol, 2-methoxyestradiol, flavanol, rotenone, griseofulvin, vinca alkaloids, including vinblastine and vincristine, maytansinoids and ansamitocins, rhizoxin, phomopsin A, ustiloxins, dolastatin 10, dolastatin 15, halichondrins and halistatins, spongistatins, cryptophycins, rhazinilam, betaine, taurine, isethionate, HO-221, adociasulfate-2, estramustine, monoclonal anti-idiotypic antibodies, microtubule assembly promoting protein (taxol-like protein, TALP), cell swelling induced by hypotonic (190 mosmol/L) conditions, insulin (100 nmol/L) or glutamine (10 mmol/L), dynein binding, gibberelin, XCHO1 (kinesin-like protein), lysophosphatidic acid, lithium ion, plant cell wall components (e.g., poly-L-lysine and extensin), glycerol buffers, Triton X-100 microtubule stabilizing buffer, microtubule associated proteins (e.g., MAP2, MAP4, tau, big tau, ensconsin, elongation factor-1-alpha (EF-1.alpha.) and E-MAP-115), cellular entities (e.g., histone H1, myelin basic protein and kinetochores), endogenous microtubular structures (e.g., axonemal structures, plugs and GTP caps), stable tubule only polypeptide (e.g., STOP145 and STOP220) and tension from mitotic forces, as well as any analogues and derivatives of any of the above. Within other embodiments, the anti-microtubule agent is formulated to further comprise a polymer.”

[0544] The term “anti-microtubule,” as used in this specification (and in the specification of U.S. Pat. No. 6,689,803), refers to any “ . . . protein, peptide, chemical, or other molecule which impairs the function of microtubules, for example, through the prevention or stabilization of polymerization. A wide variety of methods may be utilized to determine the anti-microtubule activity of a particular compound, including for example, assays described by Smith et al. (Cancer Left 79(2):213-219, 1994) and Mooberry et al., (Cancer Lett. 96(2):261-266, 1995);” see, e.g., lines 13-21 of column 14 of U.S. Pat. No. 6,689,803.

[0545] An extensive listing of anti-microtubule agents is provided in columns 14, 15, 16, and 17 of U.S. Pat. No. 6,689,803; and one or more of them may be disposed within the polymeric material together with and/or instead of the anti-mitotic compound of this invention. In one embodiment, these prior art anti-microtubule agents are made magnetic in accordance with the process described earlier in this specification.

[0546] These prior art anti-microtubule agents, which may be used to prepare the anti-mitotic compounds of this invention, include “ . . . taxanes (e.g., paclitaxel (discussed in more detail below) and docetaxel) (Schiff et al., Nature 277: 665-667, 1979; Long and Fairchild, Cancer Research 54: 4355-4361, 1994; Ringel and Horwitz, J. Natl. Cancer Inst. 83(4): 288-291, 1991; Pazdur et al., Cancer Treat. Rev. 19(4): 351-386, 1993), campothecin, eleutherobin (e.g., U.S. Pat. No. 5,473,057), sarcodictyins (including sarcodictyin A), epothilones A and B (Bollag et al., Cancer Research 55: 2325-2333, 1995), discodermolide (ter Haar et al., Biochemistry 35: 243-250, 1996), deuterium oxide (D20) (James and Lefebvre, Genetics 130(2): 305-314, 1992; Sollott et al., J. Clin. Invest. 95: 1869-1876, 1995), hexylene glycol (2-methyl-2,4-pentanediol) (Oka et al., Cell Struct. Funct. 16(2): 125-134, 1991), tubercidin (7-deazaadenosine) (Mooberry et al., Cancer Lett. 96(2): 261-266, 1995), LY290181 (2-amino-4-(3-pyridyl)-4H-naphtho(1,2-b)pyran-3-cardonitrile) (Panda et al., J. Biol. Chem. 272(12): 7681-7687, 1997; Wood et al., Mol. Pharmacol. 52(3): 437-444, 1997), aluminum fluoride (Song et al., J. Cell. Sci. Suppl. 14:147-150, 1991), ethylene glycol bis-(succinimidylsuccinate) (Caplow and Shanks, J. Biol. Chem. 265(15): 8935-8941, 1990), glycine ethyl ester (Mejillano et al., Biochemistry 31(13): 3478-3483, 1992), nocodazole (Ding et al., J. Exp. Med. 171(3): 715-727, 1990; Dotti et al., J. Cell Sci. Suppl. 15: 75-84, 1991; Oka et al., Cell Struct. Funct. 16(2): 125-134, 1991; Weimer et al., J. Cell. Biol. 136(1), 71-80, 1997), cytochalasin B (Illinger et al., Biol. Cell 73(2-3): 131-138, 1991), colchicine and CI 980 (Allen et al., Am. J. Physiol. 261(4 Pt. 1): L315-L321, 1991; Ding et al., J. Exp. Med. 171(3): 715-727, 1990; Gonzalez et al., Exp. Cell. Res. 192(1): 10-15, 1991; Stargell et al., Mol. Cell. Biol. 12(4): 1443-1450, 1992; Garcia et al., Antican. Drugs 6(4): 533-544, 1995), colcemid (Barlow et al., Cell. Motil. Cytoskeleton 19(1): 9-17, 1991; Meschini et al., J. Microsc. 176(Pt. 3): 204-210, 1994; Oka et al., Cell Struct. Funct. 16(2): 125-134, 1991), podophyllotoxin (Ding et al., J. Exp. Med. 171(3): 715-727, 1990), benomyl (Hardwick et al., J. Cell. Biol. 131(3): 709-720, 1995; Shero et al., Genes Dev. 5(4): 549-560, 1991), oryzalin (Stargell et al., Mol. Cell. Biol. 12(4): 1443-1450, 1992), majusculamide C (Moore, J. Ind. Microbiol. 16(2): 134-143, 1996), demecolcine (Van Dolah and Ramsdell, J. Cell. Physiol. 166(1): 49-56, 1996; Wiemer et al., J. Cell. Biol. 136(1): 71-80, 1997), methyl-2-benzimidazolecarbamate (MBC) (Brown et al., J. Cell. Biol. 123(2): 387-403, 1993), LY195448 (Barlow & Cabral, Cell Motil. Cytoskel. 19: 9-17, 1991), subtilisin (Saoudi et al., J. Cell Sci. 108: 357-367, 1995), 1069C85 (Raynaud et al., Cancer Chemother. Pharmacol. 35: 169-173, 1994), steganacin (Hamel, Med. Res. Rev. 16(2): 207-231, 1996), combretastatins (Hamel, Med. Res. Rev. 16(2): 207-231, 1996), curacins (Hamel, Med. Res. Rev. 16(2): 207-231, 1996), estradiol (Aizu-Yokata et al., Carcinogen. 15(9): 1875-1879, 1994), 2-methoxyestradiol (Hamel, Med. Res. Rev. 16(2): 207-231, 1996), flavanols (Hamel, Med. Res. Rev. 16(2): 207-231, 1996), rotenone (Hamel, Med. Res. Rev. 16(2): 207-231, 1996), griseofulvin (Hamel, Med. Res. Rev. 16(2): 207-231; 1996), vinca alkaloids, including vinblastine and vincristine (Ding et al., J. Exp. Med. 171(3): 715-727, 1990; Dirk et al., Neurochem. Res. 15(11): 1135-1139, 1990; Hamel, Med. Res. Rev. 16(2): 207-231, 1996; Illinger et al., Biol. Cell 73(2-3): 131-138, 1991; Wiemer et al., J. Cell. Biol. 136(1): 71-80, 1997), maytansinoids and ansamitocins (Hamel, Med. Res. Rev. 16(2): 207-231, 1996), rhizoxin (Hamel, Med. Res. Rev. 16(2): 207-231, 1996), phomopsin A (Hamel, Med. Res. Rev. 16(2): 207-231, 1996), ustiloxins (Hamel, Med. Res. Rev. 16(2): 207-231, 1996), dolastatin 10 (Hamel, Med Res. Rev. 16(2): 207-231, 1996), dolastatin 15 (Hamel, Med. Res. Rev. 16(2): 207-231, 1996), halichondrins and halistatins (Hamel, Med. Res. Rev. 16(2): 207-231, 1996), spongistatins (Hamel, Med. Res. Rev. 16(2): 207-231, 1996), cryptophycins (Hamel, Med. Res. Rev. 16(2): 207-231, 1996), rhazinilam (Hamel, Med. Res. Rev. 16(2): 207-231, 1996), betaine (Hashimoto et al., Zool. Sci. 1: 195-204,1984), taurine (Hashimoto et al., Zool. Sci. 1: 195-204,1984), isethionate (Hashimoto et al., Zool. Sci. 1: 195-204, 1984), HO-221 (Ando et al., Cancer Chemother. Pharmacol. 37: 63-69, 1995), adociasulfate-2 (Sakowicz et al., Science 280: 292-295, 1998), estramustine (Panda et al., Proc. Natl. Acad. Sci. USA 94: 10560-10564, 1997), monoclonal anti-idiotypic antibodies (Leu et al., Proc. Natl. Acad. Sci. USA 91(22): 10690-10694, 1994), microtubule assembly promoting protein (taxol-like protein, TALP) (Hwang et al., Biochem. Biophys. Res. Commun. 208(3): 1174-1180, 1995), cell swelling induced by hypotonic (190 mosmol/L) conditions, insulin (100 nmol/L) or glutamine (10 mmol/L) (Haussinger et al., Biochem. Cell. Biol. 72(1-2): 12-19, 1994), dynein binding (Ohba et al., Biochim. Biophys. Acta 1158(3): 323-332, 1993), gibberelin (Mita and Shibaoka, Protoplasma 119(1/2): 100-109,1984), XCHO1 kinesin-like protein) (Yonetani et al., Mol. Biol. Cell 7(suppl): 211A, 1996), lysophosphatidic acid (Cook et al., Mol. Biol. Cell 6(suppl): 260A, 1995), lithium ion (Bhattacharyya and Wolff, Biochem. Biophys. Res. Commun. 73(2): 383-390,1976), plant cell wall components (e.g., poly-L-lysine and extensin) (Akashi et al., Planta 182(3): 363-369, 1990), glycerol buffers (Schilstra et al., Biochem. J. 277(Pt. 3): 839-847, 1991; Farrell and Keates, Biochem. Cell. Biol. 68(11): 1256-1261, 1990; Lopez et al., J. Cell. Biochem. 43(3): 281-291, 1990), Triton X-100 microtubule stabilizing buffer (Brown et al., J. Cell Sci. 104(Pt. 2): 339-352, 1993; Safiejko-Mroczka and Bell, J. Histochem. Cytochem. 44(6): 641-656, 1996), microtubule associated proteins (e.g., MAP2, MAP4, tau, big tau, ensconsin, elongation factor-1-alpha EF-1.alpha.) and E-MAP-115) (Burgess et al., Cell Motil. Cytoskeleton 20(4): 289-300, 1991; Saoudi et al., J. Cell. Sci. 108(Pt. 1): 357-367, 1995; Bulinski and Bossler, J. Cell. Sci. 107(Pt. 10): 2839-2849, 1994; Ookata et al., J. Cell Biol. 128(5): 849-862, 1995; Boyne et al., J. Comp. Neurol. 358(2): 279-293, 1995; Ferreira and Caceres, J. Neurosci. 11(2): 392400, 1991; Thurston et al., Chromosoma 105(1): 20-30, 1996; Wang et al., Brain Res. Mol. Brain Res. 38(2): 200-208, 1996; Moore and Cyr, Mol. Biol. Cell 7(suppl): 221-A, 1996; Masson and Kreis, J. Cell Biol. 123(2), 357-371, 1993), cellular entities (e.g. histone H1, myelin basic protein and kinetochores) (Saoudi et al., J. Cell. Sci. 108(Pt. 1): 357-367, 1995; Simerly et al., J. Cell Biol. 111(4): 1491-1504, 1990), endogenous microtubular structures (e.g., axonemal structures, plugs and GTP caps) (Dye et al., Cell Motil. Cytoskeleton 21(3): 171-186, 1992; Azhar and Murphy, Cell Motil. Cytoskeleton 15(3): 156-161, 1990; Walker et al., J. Cell Biol. 114(1): 73-81, 1991; Drechsel and Kirschner, Curr. Biol. 4(12): 1053-1061, 1994), stable tubule only polypeptide (e.g., STOP145 and STOP220) (Pirollet et al., Biochim. Biophys. Acta 1160(1): 113-119, 1992; Pirollet et al., Biochemistry 31(37): 8849-8855, 1992; Bosc et al., Proc. Natl. Acad. Sci. USA 93(5): 2125-2130, 1996; Margolis et al., EMBO J. 9(12): 4095-4102, 1990) and tension from mitotic forces (Nicklas and Ward, J. Cell Biol. 126(5): 1241-1253, 1994), as well as any analogues and derivatives of any of the above. Such compounds can act by either depolymerizing microtubules (e.g., colchicine and vinblastine), or by stabilizing microtubule formation (e.g., paclitaxel).”

[0547] U.S. Pat. No. 6,689,803 also discloses (at columns 16 and 17 that, “Within one preferred embodiment of the invention, the therapeutic agent is paclitaxel, a compound which disrupts microtubule formation by binding to tubulin to form abnormal mitotic spindles. Briefly, paclitaxel is a highly derivatized diterpenoid (Wani et al., J. Am. Chem. Soc. 93:2325,1971) which has been obtained from the harvested and dried bark of Taxus brevifolia (Pacific Yew) and Taxomyces Andreanae and Endophytic Fungus of the Pacific Yew (Stierle et al., Science 60:214-216,-1993). “Paclitaxel” (which should be understood herein to include prodrugs, analogues and derivatives such as, for example, TAXOL®, TAXOTERE®, Docetaxel, 10-desacetyl analogues of paclitaxel and 3′N-desbenzoyl-3′N-t-butoxy carbonyl analogues of paclitaxel) may be readily prepared utilizing techniques known to those skilled in the art (see e.g., Schiff et al., Nature 277:665-667,1979; Long and Fairchild, Cancer Research 54:4355-4361, 1994; Ringel and Horwitz, J. Natl. Cancer Inst. 83(4):288-291, 1991; Pazdur et al., Cancer Treat. Rev. 19(4):351-386, 1993; WO9407882; WO9407881; WO9407880; WO9407876; WO9323555; WO9310076; WO9400156; WO9324476; EP590267; WO9420089; U.S. Pat. Nos. 5,294,637; 5,283,253; 5,279,949; 5,274,137; 5,202,448; 5,200,534; 5,229,529; 5,254,580; 5,412,092; 5,395,850; 5,380,751; 5,350,866; 4,857,653; 5,272,171; 5,411,984; 5,248,796; 5,248,796; 5,422,364; 5,300,638; 5,294,637; 5,362,831; 5,440,056; 4,814,470; 5,278,324; 5,352,805; 5,411,984; 5,059,699; 4,942,184; Tetrahedron Letters 35(52):9709-9712, 1994; J. Med. Chem. 35:4230-4237, 1992; J. Med. Chem. 34:992-998, 1991; J. Natural Prod. 57(10):1404-1410, 1994; J. Natural Prod. 57(11):1580-1583, 1994; J. Am. Chem. Soc. 110:6558-6560,1988), or obtained from a variety of commercial sources, including for example, Sigma Chemical Co., St. Louis, Mo. (T7402—from Taxus brevifolia).”

[0548] As is also disclosed in U.S. Pat. No. 6,689,893, “Representative examples of such paclitaxel derivatives or analogues include 7-deoxy-docetaxol, 7,8-cyclopropataxanes, N-substituted 2-azetidones, 6,7-epoxy paclitaxels, 6,7-modified paclitaxels, 10-desacetoxytaxol, 10-deacetyltaxol (from 10-deacetylbaccatin 111), phosphonooxy and carbonate derivatives of taxol, taxol 2′,7-di(sodium 1,2-benzenedicarboxylate, 10-desacetoxy-11,12-dihydrotaxol-10,12(18)-diene derivatives, 10-desacetoxytaxol, Protaxol(2′- and/or 7-O-ester derivatives), (2′-and/or 7-O-carbonate derivatives), asymmetric synthesis of taxol side chain, fluoro taxols, 9-deoxotaxane, (13-acetyl-9-deoxobaccatine III, 9-deoxotaxol, 7-deoxy-9-deoxotaxol, 10-desacetoxy-7-deoxy-9-deoxotaxol, Derivatives containing hydrogen or acetyl group and a hydroxy and tert-butoxycarbonylamino, sulfonated 2′-acryloyltaxol and sulfonated 2′-O-acyl acid taxol derivatives, succinyltaxol, 2′-.gamma.-aminobutyryltaxol formate, 2′-acetyl taxol, 7-acetyl taxol, 7-glycine carbamate taxol, 2′-OH-7-PEG(5000)carbamate taxol, 2′-benzoyl and 2′,7-dibenzoyl taxol derivatives, other prodrugs (2′-acetyl taxol; 2′,7-diacetyltaxol; 2′succinyltaxol; 2′-(beta-alanyl)-taxol); 2′gamma-aminobutyryltaxol formate; ethylene glycol derivatives of 2′-succinyltaxol; 2′-glutaryltaxol; 2′-(N,N-dimethylglycyl)taxol; 2′-(2-(N,N-dimethylamino)propionyl)taxol; 2′orthocarboxybenzoyl taxol; 2′aliphatic carboxylic acid derivatives of taxol, Prodrugs {2′(N,N-diethylaminopropionyl)taxol, 2′(N,N-dimethylglycyl)taxol, 7(N,N-dimethylglycyl)taxol, 2′,7-di-(N,N-dimethylglycyl)taxol, 7(N,N-diethylaminopropionyl)taxol, 2′,7-di(N,N-diethylaminopropionyl)taxol, 2′-(L-glycyl)taxol, 7-(L-glycyl)taxol, 2′,7-di(L-glycyl)taxol, 2′-(L-alanyl)taxol, 7-(L-alanyl)taxol, 2′,7-di(L-alanyl)taxol, 2′-(L-leucyl)taxol, 7-(L-leucyl)taxol, 2′,7-di(L-leucyl)taxol, 2′-(L-isoleucyl)taxol, 7-(L-isoleucyl)taxol, 2′,7-di(L-isoleucyl)taxol, 2′-(L-valyl)taxol, 7-(L-valyl)taxol, 2′,7-di(L-valyl)taxol, 2′-(L-phenylalanyl)taxol, 7-(L-phenylalanyl)taxol, 2′,7-di(L-phenylalanyl)taxol, 2′-(L-prolyl)taxol, 7-(L-prolyl)taxol, 2′,7-di(L-prolyl)taxol, 2′-(L-lysyl)taxol, 7-(L-lysyl)taxol, 2′,7-di(L-lysyl)taxol, 2′-(L-glutamyl)taxol, 7-(L-glutamyl)taxol, 2′,7-di(L-glutamyl)taxol, 2′-(L-arginyl)taxol, 7-(L-arginyl)taxol, 2′,7-di(L-arginyl)taxol}, Taxol analogs with modified phenylisoserine side chains, taxotere, (N-debenzoyl-N-tert-(butoxycaronyl)-10-deacetyltaxol, and taxanes (e.g., baccatin III, cephalomannine, 10-deacetylbaccatin III, brevifoliol, yunantaxusin and taxusin).”

[0549] At columns 17, 18, 19, and 20 of U.S. Pat. No. 6,689,803, several “polymeric carriers” are described. One or more of these “polymeric carriers” may be used as the polymeric material. Thus, and referring to columns 17-20 of such United States patent, “ . . . a wide variety of polymeric carriers may be utilized to contain and/or deliver one or more of the therapeutic agents discussed above, including for example both biodegradable and non-biodegradable compositions. Representative examples of biodegradable compositions include albumin, collagen, gelatin, hyaluronic acid, starch, cellulose (methylcellulose, hydroxypropylcellulose, hydroxypropylmethylcellulose, hydroxyethylcellulose, carboxymethylcellulose, cellulose acetate phthalate, cellulose acetate succinate, hydroxypropylmethylcellulose phthalate), casein, dextrans, polysaccharides, fibrinogen, poly(D,L lactide), poly(D,L-lactide-co-glycolide), poly(glycolide), poly(hydroxybutyrate), poly(alkylcarbonate) and poly(orthoesters), polyesters, poly(hydroxyvaleric acid), polydioxanone, poly(ethylene terephthalate), poly(malic acid), poly(tartronic acid), polyanhydrides, polyphosphazenes, poly(amino acids) and their copolymers (see generally, Illum, L., Davids, S. S. (eds.) “Polymers in Controlled Drug Delivery” Wright, Bristol, 1987; Arshady, J. Controlled Release 17:1-22, 1991; Pitt, Int. J. Phar. 59:173-196, 1990; Holland et al., J. Controlled Release 4:155-0180, 1986). Representative examples of nondegradable polymers include poly(ethylene-vinyl acetate) (“EVA”) copolymers, silicone rubber, acrylic polymers (polyacrylic acid, polymethylacrylic acid, polymethylmethacrylate, polyalkylcynoacrylate), polyethylene, polyproplene, polyamides (nylon 6,6), polyurethane, poly(ester urethanes), poly(ether urethanes), poly(ester-urea), polyethers (poly(ethylene oxide), poly(propylene oxide), Pluronics and poly(tetramethylene glycol)), silicone rubbers and vinyl polymers (polyvinylpyrrolidone, poly(vinyl alcohol), poly(vinyl acetate phthalate). Polymers may also be developed which are either anionic (e.g. alginate, carrageenin, carboxymethyl cellulose and poly(acrylic acid), or cationic (e.g., chitosan, poly-L-lysine, polyethylenimine, and poly (allyl amine)) (see generally, Dunn et al., J. Applied Polymer Sci. 50:353-365, 1993; Cascone et al., J. Materials Sci.: Materials in Medicine 5:770-774, 1994; Shiraishi et al., Biol. Pharm. Bull. 16(11):1164-1168, 1993; Thacharodi and Rao, Int'l J. Pharm. 120:115-118, 1995; Miyazaki et al., Int'l J. Pharm. 118:257-263, 1995). Particularly preferred polymeric carriers include poly(ethylenevinyl acetate), poly (D,L-lactic acid) oligomers and polymers, poly (L-lactic acid) oligomers and polymers, poly (glycolic acid), copolymers of lactic acid and glycolic acid, poly (caprolactone), poly (valerolactone), polyanhydrides, copolymers of poly (caprolactone) or poly (lactic acid) with a polyethylene glycol (e.g., MePEG), and blends thereof.”

[0550] As is also disclosed in U.S. Pat. No. 6,689,893, “Polymeric carriers can be fashioned in a variety of forms, with desired release characteristics and/or with specific desired properties. For example, polymeric carriers may be fashioned to release a anti-mitotic compound upon exposure to a specific triggering event such as pH (see e.g., Heller et al., “Chemically Self-Regulated Drug Delivery Systems,” in Polymers in Medicine III, Elsevier Science Publishers B. V., Amsterdam, 1988, pp. 175-188; Kang et al., J. Applied Polymer Sci. 48:343-354, 1993; Dong et al., J. Controlled Release 19:171-178, 1992; Dong and Hoffman, J. Controlled Release 15:141-152, 1991; Kim et al., J. Controlled Release 28:143-152, 1994; Cornejo-Bravo et al., J. Controlled Release 33:223-229, 1995; Wu and Lee, Pharm. Res. 10(10):1544-1547, 1993; Serres et al., Pharm. Res. 13(2):196-201, 1996; Peppas, “Fundamentals of pH- and Temperature-Sensitive Delivery Systems,” in Gurny et al. (eds.), Pulsatile Drug Delivery, Wissenschaftliche Verlagsgesellschaft mbH, Stuttgart, 1993, pp. 41-55; Doelker, “Cellulose Derivatives,” 1993, in Peppas and Langer (eds.), Biopolymers I, Springer-Verlag, Berlin). Representative examples of pH-sensitive polymers include poly(acrylic acid) and its derivatives (including for example, homopolymers such as poly(aminocarboxylic acid); poly(acrylic acid); poly(methyl acrylic acid), copolymers of such homopolymers, and copolymers of poly(acrylic acid) and acrylmonomers such as those discussed above. Other pH sensitive polymers include polysaccharides such as cellulose acetate phthalate; hydroxypropylmethylcellulose phthalate; hydroxypropylmethylcellulose acetate succinate; cellulose acetate trimellilate; and chitosan. Yet other pH sensitive polymers include any mixture of a pH sensitive polymer and a water soluble polymer.”

[0551] As is also disclosed in U.S. Pat. No. 6,689,893, “Likewise, polymeric carriers can be fashioned which are temperature sensitive (see e.g., Chen et al., “Novel Hydrogels of a Temperature-Sensitive Pluronic Grafted to a Bioadhesive Polyacrylic Acid Backbone for Vaginal Drug Delivery,” in Proceed. Intern. Symp. Control. Rel. Bioact. Mater. 22:167-168, Controlled Release Society, Inc., 1995; Okano, “Molecular Design of Stimuli-Responsive Hydrogels for Temporal Controlled Drug Delivery,” in Proceed. Intern. Symp. Control. Rel. Bioact. Mater. 22:111-112, Controlled Release Society, Inc., 1995; Johnston et al., Pharm. Res. 9(3):425-433, 1992; Tung, Int'l J. Pharm. 107:85-90, 1994; Harsh and Gehrke, J. Controlled Release 17:175-186, 1991; Bae et al., Pharm. Res. 8(4):531-537, 1991; Dinarvand and D'Emanuele, J. Controlled Release 36:221-227, 1995; Yu and Grainger, “Novel Thermo-sensitive Amphiphilic Gels: Poly N-isopropylacrylamide-co-sodium acrylate-co-n-N-alkylacrylamide Network Synthesis and Physicochemical Characterization,” Dept. of Chemical & Biological Sci., Oregon Graduate Institute of Science & Technology, Beaverton, Oreg., pp. 820-821; Zhou and Smid, “Physical Hydrogels of Associative Star Polymers,” Polymer Research Institute, Dept. of Chemistry, College of Environmental Science and Forestry, State Univ. of New York, Syracuse, N.Y., pp. 822-823; Hoffman et al., “Characterizing Pore Sizes and Water ‘Structure’ in Stimuli-Responsive Hydrogels,” Center for Bioengineering, Univ. of Washington, Seattle, Wash., p. 828; Yu and Grainger, “Thermo-sensitive Swelling Behavior in Crosslinked N-isopropylacrylamide Networks: Cationic, Anionic and Ampholytic Hydrogels,” Dept. of Chemical & Biological Sci., Oregon Graduate Institute of Science & Technology, Beaverton, Oreg., pp. 829-830; Kim et al., Pharm. Res. 9(3):283-290, 1992; Bae et al., Pharm. Res. 8(5):624-628, 1991; Kono et al., J. Controlled Release 30:69-75, 1994; Yoshida et al., J. Controlled Release 32:97-102.1994; Okano et al., J. Controlled Release 36:125-133, 1995; Chun and Kim, J. Controlled Release 38:39-47, 1996; D'Emanuele and Dinarvand, Int'l J. Pharm. 118:237-242, 1995; Katono et al., J. Controlled Release 16:215-228, 1991; Hoffman, “Thermally Reversible Hydrogels Containing Biologically Active Species,” in Migliaresi et al. (eds.), Polymers in Medicine III, Elsevier Science Publishers B. V., Amsterdam, 1988, pp. 161-167; Hoffman, “Applications of Thermally Reversible Polymers and Hydrogels in Therapeutics and Diagnostics,” in Third International Symposium on Recent Advances in Drug Delivery Systems, Salt Lake City, Utah, Feb. 24-27, 1987, pp. 297-305; Gutowska et al., J. Controlled Release 22:95-104, 1992; Palasis and Gehrke, J. Controlled Release 18:1-12, 1992; Paavola et al., Pharm. Res. 12(12):1997-2002, 1995).”

[0552] As is also disclosed in U.S. Pat. No. 6,689,893, “Representative examples of thermogelling polymers, and their gelatin temperature (LCST (° C.)) include homopolymers such as poly(-methyl-N-n-propylacrylamide),19.8; poly(N-n-propylacrylamide), 21.5; poly(N-methyl-N-isopropylacrylamide), 22.3; poly(N-n-propylmethacrylamide), 28.0; poly(N-isopropylacrylamide), 30.9; poly(N,n-diethylacrylamide), 32.0; poly(N-isopropylmethacrylamide), 44.0; poly(N-cyclopropylacrylamide), 45.5; poly(N-ethylmethyacrylamide), 50.0; poly(N-methyl-N-ethylacrylamide), 56.0; poly(N-cyclopropylmethacrylamide), 59.0; poly(N-ethylacrylamide), 72.0. Moreover thermogelling polymers may be made by preparing copolymers between (among) monomers of the above, or by combining such homopolymers with other water soluble polymers such as acrylmonomers (e.g., acrylic acid and derivatives thereof such as methylacrylic acid, acrylate and derivatives thereof such as butyl methacrylate, acrylamide, and N-n-butyl acrylamide).”

[0553] As is also disclosed in U.S. Pat. No. 6,689,893, “Other representative examples of thermogelling polymers include cellulose ether derivatives such as hydroxypropyl cellulose, 41° C.; methyl cellulose, 55° C.; hydroxypropylmethyl cellulose, 66° C.; and ethylhydroxyethyl cellulose, and Pluronics such as F-127, 10-15° C.; L-122, 19° C.; L-92, 26° C.; L-81, 20° C.; and L-61, 24° C.”

[0554] As is also disclosed in U.S. Pat. No. 6,689,893, “Preferably, therapeutic compositions of the present invention are fashioned in a manner appropriate to the intended use. Within certain aspects of the present invention, the therapeutic composition should be biocompatible, and release one or more therapeutic agents over a period of several days to months. For example, “quick release” or “burst” therapeutic compositions are provided that release greater than 10%, 20%, or 25% (w/v) of a therapeutic agent (e.g., paclitaxel) over a period of 7 to 10 days. Such “quick release” compositions should, within certain embodiments, be capable of releasing chemotherapeutic levels (where applicable) of a desired agent. Within other embodiments, “low release” therapeutic compositions are provided that release less than 1% (w/v) of a therapeutic agent a period of 7 to 10 days. Further, therapeutic compositions of the present invention should preferably be stable for several months and capable of being produced and maintained under sterile conditions.”

[0555] In one preferred embodiment, the anti-mitotic compound is disposed on or in a drug-eluting polymer that is adapted to elute the anti-mitotic compound at a specified rate. These polymers are well known and are often used in conjunction with drug-eluting stents. Reference may be had, e.g., to U.S. Pat. No. 6,702,850 (multi-coated drug-eluting stent), U.S. Pat. No. 6,671,562 (high impedance drug eluting cardiac lead), U.S. Pat. Nos. 6,206,914, 6,004,346 (intralumenl drug eluting prosthesis), U.S. Pat. Nos. 5,997,468, 5,871,535 (intralumenal drug eluting prosthesis), U.S. Pat. Nos. 5,851,231, 5,851,217, 5,725,567, 5,697,967 (drug eluting stent), U.S. Pat. No. 5,599,352 (method of making a drug eluting stent), U.S. Pat. No. 5,591,227 (drug eluting stent), U.S. Pat. No. 5,545,208 (intralumenal drug eluting prosthesis), U.S. Pat. No. 5,217,028 (bipolar cardiac lead with drug eluting device), U.S. Pat. No. 4,953,564 (screw-in drug eluting lead), and the like. The entire disclosure of each of these United States patents is hereby incorporated by reference into this specification.

A Process for Delivering the Magnetic Anti-Mitotic Compound

[0556] FIG. 1 is a schematic of a preferred process 10 for delivering the magnetic anti-mitotic compound described elsewhere in this specification to a specified location. In one embodiment, the magnetic anti-mitotic compound is disposed within a biological organism such as, e.g., a blood vessel 12, and particles 14 of the anti-mitotic compound are delivered to a drug-eluting stent 16.

[0557] Referring to FIG. 1, and to the preferred embodiment depicted therein, a bodily fluid, such as blood (not shown for the sake of simplicity of representation) is continuously fed to and through blood vessel 12 in the directions of arrows 20 and 22. In the embodiment depicted, the blood is fed through a generator 26 in order to cause the production of electrical current. In one preferred embodiment, the generator 26 is implanted within an artery 12 or vein 12 of a human being. In another embodiment, not shown, the generator 26 is disposed outside of the artery 12 or vein 12 of the human being.

[0558] One may use any of the implanted or implantable generators known to those skilled in the art. Thus, e.g., one may use the power supply disclosed and claimed in U.S. Pat. No. 3,486,506, the entire disclosure of which is hereby incorporated by reference into this specification. This patent claims an electric pulse generator adapted to be implanted within a human body. The generator comprises stator winding means, a permanent magnet rotor rotatably mounted adjacent the stator winding means for inducing electrical potentials therein, and means responsive to the movement of the heart for imparting an oscillatory rotary motion to said rotor at approximately the frequency of the heart beat. In one embodiment, the device of U.S. Pat. No. 3,486,506 is a spring-driven cardiac stimulator.

[0559] By way of further illustration, the generator 26 may be the heart-actuated generator described and claimed in U.S. Pat. No. 3,554,199, the entire disclosure of which is hereby incorporated by reference in to this specification. Claim 1 of this patent describes: “A device adapted for implantation in the human body for electrically stimulating the heart comprising an envelope housing, an alternating-current generator contained within said housing having a rotor mounted for rotational movement, said rotor having the form of a permanent magnet, a shaft rotatably journaled within said housing, a balance mounted for oscillatory rotational movement about said shaft, the axis of rotation of said rotor being parallel and eccentric to said shaft about which the balance oscillates, a resilient member connected between said housing and the balance, a rotatable member connected with the balance being driven thereby and arranged coaxially with said rotor, a mechanical coupling connecting said rotatable member with said rotor for driving same when said rotatable member is driven by said balance, and electrical contact means connected between said alternating-current generator and the heart muscle for supplying electrical pulses to the heart so as to stimulate the same.”

[0560] By way of further illustration, the device disclosed in U.S. Pat. No. 3,563,245 also comprises a miniaturized power supply unit which employs the mechanical energy of heart muscle contractions to produce electrical energy for a pacemaker. This patent claims: “1. A biologically implantable and energized power supply for implanted electric and electronic devices, comprising: a. Fluid pressure sensing means to be disposed inside a heart ventricle for detecting fluid pressure variations therein; b. an energy conversion unit to be disposed outside the heart; c. fluid pressure transfer means connected to said fluid pressure sensing means and to said energy conversion units; said energy conversion unit comprising: d. means for converting said fluid pressure variations into reciprocal motion; e. an electromagnetic generator having a reciprocally rotatable armature; f. means for communicating said reciprocal motion to the reciprocally rotatable armature and thereby convert same therein to corresponding alternating current pulses of electrical energy; g. rectifier means connected to said electromagnetic generator for rectification of said alternating current of electrical energy to corresponding direct current pulses of electrical energy; h. accumulator means connected to said rectifier means for storage therein of the energy in said direct current pulses of electrical energy; and i. connector means connected to said accumulator means for connection thereto of said implanted electric and electronic devices.”

[0561] By way of yet further illustration, U.S. Pat. No. 3,456,134 (the entire disclosure of which is hereby incorporated by reference into this specification) discloses a piezoelectric converter for implantable devices utilizing a piezoelectric crystal in the form a weighted cantilever beam that is adapted to respond to body movement to generate electrical pulses. This patent claims: “1. A converter of body motion to electrical energy for use with electronic implants in the body comprising: a closed container of a material not affected by body fluids, a piezoelectric crystal in the form of a cantilevered beam within said container and extending inwardly from a wall of said container with one end anchored in said container wall and the opposite end free to move, a weight mounted on said free end of said crystal cantilvered beam, and means connecting said crystal to the electronic implants in the body.”

[0562] As is disclosed in U.S. Pat. No. 3,456,134, when the device of this patent was implanted in the heart of a dog and driven at a mechanical pulse rate of 80 pulses per minute, its produced a maximum output of 4.0 volts at 105 ohms load, or 160 microwatts (see column 2 of the patent).

[0563] By way of yet further illustration, the generator 26 may be the piezoelectric converter disclosed in U.S. Pat. No. 3,659,615, the entire disclosure of which is hereby incorporated by reference into this specification. This patent claims: “1. An encapsulated pacesetter implantable in a living system and responsive to movement of an organic muscle to which it is applied to stimulate and pace the natural movement of the muscle, said pacesetter comprising a piezoelectric unit, a transducer, input electrodes electrically connecting said transducer with said generator unit, generator output electrodes for implantation in the muscle tissue, an encapsulating envelope completely enclosing said pacesetter, said envelope formed of a living tissue compatible material consisting of medical grade silicone rubber and a natural wax substantially uniformly and intimately integrated together as a material possessing flexibility sufficient to respond to movement of the muscle tissue in which it is implanted.”

[0564] By way of yet further illustration, U.S. Pat. No. 4,453,537 (the entire disclosure of which is hereby incorporated by reference into this specification) discloses a pressure actuated artificial heart powered by another implanted device attached to a body muscle; the body muscle is stimulated by an electrical signal from a pacemaker. This patent claims: “A device comprising in combination a body implant device and an apparatus for powering said body implant device; said device comprising a reservoir; said reservoir being implantable in the body adjacent to at least one muscle; a fluid disposed within said reservoir; a pressure actuated body implant device; a conduit connecting said reservoir to said body implant device and providing a fluid connection between said reservoir and body implant device; means for periodically stimulating said at least one body muscle from a relaxed state to a contracted state for periodically contracting said at least one body muscle against said reservoir to pressurize said fluid to cause it to flow from said reservoir toward said body implant device; said body implant device including means responsive to said pressurized fluid for powering said body implant device; upon relaxation of said at least one muscle said reservoir returning to its original unpressurized state, thereby creating a vacuum so as to cause the return of said fluid thereto.” As is disclosed in this patent, “The fluid containing reservoir which is implantable in the body and attachable to a body muscle comprises a piston slidably disposed within a cylinder. Preferably, the piston-cylinder reservoir is implanted in the thigh and attached to the rectus femoris muscle . . . . The piston cylinder reservoir is then implanted in the thigh and the insertion end of the muscle is attached to the cylinder and the origin end of the muscle is attached to the piston. The piston-cylinder reservoir is filled with a fluid such as a gas like nitrogen or a liquid such as silicon or oil, and connected to the artificial heart by a biocompatible flexible plastic tubing. Contraction of the rectus femoris muscle forces the piston into the cylinder thereby pressurizing the fluid contained within the cylinder and causing it to flow out of the cylinder and through the flexible plastic tubing toward the artificial heart.”

[0565] By way of yet further illustration, U.S. Pat. No. 5,810,015, the entire disclosure of which is hereby incorporated by reference into this specification, discloses an implantable power supply that is comprised means for converting non-electrical energy to electrical energy. Claim 1 of this patent describes: “1. An implantable power supply apparatus for supplying electrical energy to an electrically powered device, comprising: a power supply unit including:

[0566] A. a transcutaneously, invasively rechargeable non-electrical energy storage device (NESD); B. an electrical energy storage device (EESD); and C. an energy converter coupling said NESD and said EESD, said converter including means for converting non-electrical energy stored in said NESD to electrical energy and for transferring said electrical energy to said EESD, thereby storing said electrical energy in said EESD.”

[0567] The “prior art” devices for storing non-electrical energy are described at columns 2-4 of U.S. Pat. No. 5,810,015, wherein it is disclosed that: “Any device may be used to store non-electrical energy in accordance with the invention. Many such devices are known which are suitable to act as NESD 22. For example, devices capable of storing mechanical energy, physical phase transition/pressure energy, chemical energy, thermal energy, nuclear energy, and the like, may be used in accordance with the invention. Similarly, any device may be used to store electrical energy in accordance with the invention and to act as EESD 24. Suitable EESDs include, for example, rechargeable batteries and capacitors. Any device capable of converting non-electrical energy to electrical energy may be used to convert energy in accordance with the invention and to act as energy converter 26. When the non-electrical energy used is mechanical energy, for example, energy converter 26 may include a piezoelectric crystal and associated rectifier circuitry as needed. The apparatus of the invention may also include an implanted electrical circuit, such as a driver for a solenoid driven valve, and means for extracting electrical energy from EESD 24 and applying the extracted electrical energy to the electrical circuit.

[0568] U.S. Pat. No. 5,810,015 also discloses that: “When the non-electrical energy is mechanical energy, for example, NESD 22 may include a closed fluid system wherein recharging occurs by compression of the fluid. Such a system 10′ is represented in FIGS. 2A and 2B. System 10′ is an implantable medicant infusion pump which includes a biocompatible housing 16 for example, made of titanium, having a piercable septum 18 centrally located in its top surface. A bellows assembly 23 extends from the septum 18 to define a variable volume fluid (or medicant) reservoir 21. A valve/accumulator assembly 30 is coupled between reservoir 21 and an exit cannula 34 to establish a selectively controlled fluid/medicant flow path 34A from the reservoir 21 to a point within the body at the distal tip of cannula 34. In one form of the invention, the valve/accumulator assembly 30 has the form shown in FIG. 3, and includes two solenoid valves 30A, 30B which control the filling and emptying of an accumulator 30C in response signals applied by a controller 32. In response to such signals, the accumulator of assembly 30 drives a succession of substantially uniform pulses of medicant through said catheter 34.”

[0569] U.S. Pat. No. 5,810,015 also discloses that: “In the illustrated embodiment, valve/accumulator 30, includes an input port 30′ coupled between reservoir 21 and valve 30A and an output port 30″ coupled between valve 30B and catheter 34. The accumulator includes a diaphragm 31 that is movable between limit surface 33 one side of the diaphragm and limit surface 35 on the other side of the diaphragm. Surface 35 includes open-faced channels therein, defining a nominal accumulator volume that is coupled to valves 30A and 30B. A pressure PB is maintained on the side of diaphragm 31 that is adjacent to surface 35. A pressure of PR is maintained at port 30′, due to the positive pressure exerted on bellows 23 from the fluid in chamber 22A, as described more fully below. A pressure PO is at port 30″, reflecting the relatively low pressure within the patient at the distal end of catheter 34. In operation, the pressure PB is maintained between the PR and PO. Normally, valves 30A and 30B are closed, and diaphragm 31 is biased against surface 33. To generate an output pulse of medicant in catheter 34, valve 30A is opened, and the pressure differential between port 30′ and PB drives fluid into the accumulator 30, displacing the diaphragm 31 to surface 35. The valve 30A is then closed and valve 30B is opened. In response, the pressure differential PB−PO drives an increment of fluid (substantially equal to the previously added fluid) into catheter 34, displacing the diaphragm back to surface 33. Valve 30B then closes, completing the infusion cycle. All valve operations are under the control of controller 32. In other embodiments, other medicant infusion configurations may be used. The controller 32 includes microprocessor-based electronics which may be programmed, for example, by an external handheld unit, using pulse position modulated signals magnetically coupled to telemetry coils within housing 16. Preferably, communication data integrity is maintained by redundant transmissions, data echo and checksums.”

[0570] One embodiment of the non-electrical storage device of U.S. Pat. No. 5,810,015 is disclosed in columns 3 et seq. of such patent, wherein it is disclosed that: “In one form of the invention, the bellows assembly 23, together with the inner surface of housing 16, define a variable volume closed fluid chamber 22A which contains a predetermined amount of a gas phase fluid, such as air. The charge of fluid in chamber 22A maintains a positive pressure in the reservoir 21, so that with appropriately timed openings and closings of the valves 30A and 30B, infusate from reservoir 21 is driven through catheter 34. A port 22B couples the chamber 22A to a mechanical-to-electrical energy converter 26, which in turn is coupled to a rechargeable storage battery 24. The battery 24 is coupled to supply power to controller 32 and valves 30A and 30B, and may be used to power other electronic circuitry as desired.”

[0571] U.S. Pat. No. 5,810,015 discusses the conversion of mechanical energy to electrical energy at columns 4 et seq., wherein it is disclosed that: “An exemplary mechanical-to-electrical energy converter 26 is shown in FIG. 4. That converter 26 includes a first chamber 26A which is coupled directly via port 22B to chamber 22A, and is coupled via valve 26B, energy extraction chamber 26C, and valve 26D to a second chamber 26E. Energy extraction chamber 26C is preferably a tube having a vaned flow restrictors in its interior, where those flow restrictors are made of piezoelectric devices. A rectifier network 26F is coupled to the piezoelectric devices of chamber 26C and provides an electrical signal via line 26′ to EESD 24. The valves 26B and 26D are operated together in response to control signals from controller 32. When those valves are open, fluid (in gas phase) flows from chamber 22A via chamber 26A and 26C to chamber 26E when the pressure in chamber 22A is greater than the pressure in chamber 26E, and in the opposite direction when the pressure in chamber 22A is less than the pressure in chamber 26E. In both flow directions, the vanes of chamber 26C are deflected by the flowing fluid, which results in generation of an a.c. electrical potential, which in turn is rectified by network 26F to form a d.c. signal used to store charge in EESD 24.”

[0572] As is also disclosed in U.S. Pat. No. 5,810,015, “In the operation of this form of the invention, with valves 26B and 26D closed, the chamber 22A is initially charged with fluid, such as air, so that the fluid in chamber 22A exists in gas phase at body temperature over the full range of volume of reservoir 21. Initially, bellows assembly 23 is fully charged with medicant, and thus is fully expanded to maximize the volume of the reservoir 21. The device 10′ is then implanted. After implantation of the device 10′, and valves 26B and 26D are opened, thereby resulting in gas flow through chamber 26C until equilibrium is reached. Then valves 26B and 26D are closed. Thereafter, in response to its internal programming, the controller 32 selectively drives valve/accumulator 30 to complete a flow path between reservoir 21 and cannula, and as described above in conjunction with FIG. 3, driving medicant from reservoir 21, via cannula 34 (and flow path 34A) to a point within the body at a desired rate. In response to that transfer of medicant from reservoir 21, the volume of reservoir 21 decreases, causing an increase in the volume of chamber 22A. As the latter volume increases, a low pressure tends to be established at port 22B. That pressure, with valves 26B and 26D open, in turn draws gas from chamber 26E and through chamber 26C, thereby generating an electrical signal at rectifier 26F. When the reservoir 21 is depleted of medicant, a device such as a syringe may be used to pierce the skin and penetrate the septum 18, and inject a liquid phase medicant or other infusate into reservoir 21, thereby replenishing the medicant in reservoir 21. As liquid is injected into reservoir 21, the bellows assembly 23, expands causing an increase in the volume of reservoir 21 and a decrease in the volume of the phase fluid in chamber 22A, representing storage of mechanical energy. Valves 26B and 26D are then opened, establishing an equilibrating gas flow through chamber 26C, resulting in transfer of charge to EESD 24. In this embodiment, valves 26B and 26D are on opposite sides of chamber 26C. In other embodiments, only one of these valves may be present, and the converter 26 will still function in a similar manner. In yet another embodiment, where chamber 26C has a relatively high flow impedance, there is no need for either of valves 26B and 26D.”

[0573] U.S. Pat. No. 5,810,015 also discloses that: “In another form, the bellows assembly 23, together with the inner surface of housing 16, define a variable volume closed fluid chamber 22A which contains a predetermined amount of a fluid, such as freon, which at normal body temperatures exists both in liquid phase and gas phase over the range of volume of chamber 22A. Preferably, the fluid in reservoir 22A is R-11 Freon, which at body temperature 98.6° F. and in a two phase closed system, is characterized by a vapor pressure of approximately 8 psi, where the ratio of liquid-to-gas ratio varies with the volume of chamber 22A. The charge of fluid in chamber 22A maintains a positive pressure in the reservoir 21, so that with appropriately timed openings and closings of the valves 30A and 30B, infusate from reservoir 21 is driven through catheter 34. A port 22B couples the chamber 22A to a mechanical-to-electrical energy converter 26, which in turn is coupled to a rechargeable storage battery 24. The battery 24 is coupled to supply power to controller 32 and valve 30A and 30B. The mechanical-to-electrical energy converter 26 is the same as that described above and as shown in FIG. 4. In this form of the invention, the non-electrical energy is referred to as physical phase transition/pressure energy. In the operation of this form of the invention, the chamber 22A is initially charged with fluid, such as Freon R-11, so that the fluid in chamber 22A exists in both liquid phase and gas phase at body temperature over the full range of volume of reservoir 21. Initially, bellows assembly 23 is fully charged with medicant and thus fully expanded to maximize the volume of reservoir 21. The device is then implanted. Then after implantation of the device 10′, in response to its internal programming, the controller 32 selectively drives valve/accumulator 30 to complete a flow path between reservoir 21 and cannula, and as described above, in conjunction with FIG. 3, to drive medicant from reservoir 21, via cannula 34 (and flow path 34A) to a point within the body at a desired rate. In response to that transfer of medicant from reservoir 21, the volume of reservoir 21 decreases, causing an increase in the volume of chamber 22A. As the latter volume increases, a low pressure tends to be established at port 22B prior to achievement of equilibrium. That pressure, with valves 26B and 26D open, in turn draws gas from chamber 26E and through chamber 26C, thereby generating an electrical signal at rectifier 26F. As the reservoir 21 is depleted of medicant, a device such as a syringe may be used to pierce the skin and penetrate the septum 18, followed by injection of a liquid phase medicant or other infusate into reservoir 21, thereby replenishing the medicant in reservoir 21. As liquid is injected into reservoir 21, the bellows assembly expands causing an increase in the volume of reservoir 21 and a decrease in the volume of the two phase fluid in chamber 22A. That results in an increase in pressure at port 22B representing storage of mechanical energy. Valves 26B and 26D are then opened, establishing an equilibrating gas flow through chamber 26C, resulting in storage of charge in EESD 24. As the bellows assembly 23 is expanded, the re-compression of chamber 22A effects a re-charge of battery 24. The rectifier 26F establishes charging of battery 24 in response to forward and reverse gas flow caused by the expansion and contraction of bellows assembly 23. The present embodiment is particularly useful in configurations similar to that in FIG. 2A, but where the various components are positioned within housing 16 so that the converter 26 normally is higher than the liquid-gas interface in chamber 22A. When implanted, and where the user is upright. With that configuration, and appropriately charged with Freon, the fluid within converter 26 is substantially all in gas phase. In order to prevent liquid phase Freon from passing to chamber 26C when the user is prone, a gravity activated cut-off valve (not shown) may be located in port 22B.”

[0574] Other implantable devices for converting mechanical energy to electrical energy are discussed at columns 6 et seq. of U.S. Pat. No. 5,810,015. Thus, e.g., it is disclosed that: “In another embodiment in which mechanical energy is stored in NESD 22, shown in FIG. 6, NESD 22 includes a compressible spring 41B. Spring 41B is connected to a compressor assembly 43 which may be accessed transcutaneously. Any means may be used to compress spring 41B. As shown in FIG. 6, compressor 43 includes a screw which may be turned by application of a laparoscopic screwdriver 45.

[0575] As is also disclosed in U.S. Pat. No. 5,810,015, “When the non-electrical energy stored in NESD 22 is chemical energy, NESD 22 includes a fluid activatable chemical system. Recharging may occur by injection of one or more chemical solutions into NESD 22. Any chemical solutions may be used to store chemical energy in NESD 22 in accordance with this embodiment of the invention. For example, a solution of electrolytes may be used to store chemical energy in NESD 22.”

[0576] U.S. Pat. No. 5,810,015 also discloses that: “When the non-electrical energy stored in NESD 22 is thermal energy, NESD 22 includes a thermal differential energy generator capable of generating electrical energy when a fluid having a temperature greater than normal mammalian body temperature is injected into the generator. By way of example, a Peltier effect device may be used, where application of a temperature differential causes generation of an electrical potential. Alternatively, a bimetallic assembly may be used where temperature-induced mechanical motion may be applied to a piezoelectric crystal which in turn generates an electrical potential.”

[0577] U.S. Pat. No. 5,810,015 also discloses that: “In another embodiment, the invention provides a method of supplying energy to an electrical device within a mammalian body which comprises implanting into the mammal an apparatus including a power supply having: a transcutaneously rechargeable NESD; an EESD; and an energy converter coupling said rechargeable means and the storage device, where the converter converts non-electrical energy stored in the NESD to electrical energy and transfers the electrical energy to the EESD, thereby storing the electrical energy in the EESD; and transcutaneously applying non-electrical energy to the NESD. Any of the devices described above may be used in the method of the invention.”

[0578] Referring again to FIG. 1, and to the preferred embodiment depicted therein, the blood preferably flows in the direction of arrow 20, past generator 26, and through stent assembly. The electrical energy from generator 26 is passed via line 28 to regulator 30.

[0579] In one referred embodiment, the generator 26 produces alternating current that is converted into direct current by regulator 30. One may use, e.g., any of the implantable rectifiers known to those skilled in the art as regulator 30.

[0580] These prior art implantable rectifiers are well known and are described, e.g., in U.S. Pat. No. 5,999,849, the entire disclosure of which is hereby incorporated by reference into this specification. As is disclosed in this patent, medical devices that are configured to perform a desired medical function are often implanted in the living tissue of a patient so that a desired function may be carried out as needed for the benefit of the patient. “Numerous examples of implantable medical devices are known in the art, ranging from implantable pacemakers, cochlear stimulators, muscle stimulators, glucose sensors, and the like. Some implantable medical devices are configured to perform the sensing function, i.e., to sense a particular parameter, e.g., the amount of a specified substance in the blood or tissue of the patient, and to generate an electrical signal indicative of the quantity or concentration level of the substance sensed. Such electrical signal is then coupled to a suitable controller, which may or may not be implantable, and the controller responds to the sensed information in a way to enable the medical device to perform its intended function, e.g., to display and/or record the measurement of the sensed substance. An example of an implantable medical device that performs the sensing function is shown, e.g., in U.S. Pat. No. 4,671,288.”

[0581] As is also disclosed in U.S. Pat. No. 5,999,849, “As medical devices have become more useful and numerous in recent years, there is a continual need to provide very low power sensors that may be connected to, or incorporated within, such devices so that the desired function of the device can be carried out without the expenditure of large amounts of power (which power, for an implanted device, is usually limited.) It is known in the art to inductively couple a high frequency ac signal into an implanted medical device to provide operating power for the circuits of the device. Once received within the implanted device, a rectifier circuit, typically a simple full-wave or half-wave rectifier circuit realized with semiconductor diodes, is used to provide the rectifying function. Unfortunately, when this is done, a significant signal loss occurs across the semiconductor diodes, i.e., about 0.7 volts for silicon, which signal loss represents lost power, and for low level input signals of only a volt or two represents a significant decrease in the efficiency of the rectifier. For the extremely low power implantable devices and sensors that have been developed in recent years, low operating voltages, e.g., 2-3 volts, are preferable in order to keep overall power consumption low. Unfortunately, with such low operating voltages are used, a diode voltage drop of 0.7 volts represents a significant percentage of the overall voltage, thus resulting in a highly inefficient voltage rectification or conversion process. An inefficient voltage conversion, in turn, translates directly to increased input power, which increased input power defeats the overall design goal of the low power device. What is needed, therefore, is a low power rectifier circuit that efficiently converts a low amplitude alternating input signal to a low output operating voltage.” The device described and claimed in U.S. Pat. No. 5,999,849 is: “1. A low power switched rectifier circuit comprising: first and second voltage rails (120, 122); a storage capacitor (C1) connected between the first and second voltage rails; first and second input lines (LINE 1, LINE 2); a first switch (M1) connecting the first input line to the first voltage rail; a second switch (M2) connecting the second input line to the first voltage rail; a third switch (M3) connecting the first input line to the second voltage rail; a fourth switch (M4) connecting the second input line to the second voltage rail; a detector circuit for each of said first, second, third, and fourth switches, respectively, powered by voltage on the storage capacitor, that automatically controls its respective switch to close and open as a function of the voltage signal appearing on the first input line relative to the second input line such that, in concert, the first and fourth switches close and the second and third switches open in response to a positive signal on the first input line relative to the second input line, and such that second and third switches close and the first and fourth switches open in response to a negative signal on the first input line relative to the second input line, whereby the first input line is automatically connected to the first voltage rail and the second input line is automatically connected to the second voltage rail whenever a positive signal appears on the first input line relative to the second input line, and whereby the first input line is automatically connected to the second voltage rail and the second input line is automatically connected to the first voltage rail whenever a negative signal appears on the first input line relative to the second input line; and startup means for supplying the storage capacitor with an initial voltage sufficient to power each of the detector circuits; said low power switched rectifier circuit wherein all of said first, second, third, and fourth switches and respective detector circuits are all part of a single integrated circuit.”

[0582] Thus, by way of further illustration, reference to U.S. Pat. No. 6,456,883, the entire disclosure of which is hereby incorporated by reference into this specification, one may use the implantable rectifier disclosed in such patent. This patent claims, e.g., “36. A method for providing an electrical power feed selection for an implantable medical device comprising: transmitting radio frequency signals to an antenna of the implantable medical device; rectifying the radio frequency signals by a rectifier circuit; storing energy contained in the transmitted radio frequency signals in a supplemental power source that comprises an energy storage device; comparing voltage levels of an electrical main power source and the supplemental power source and outputting a signal from a comparator indicating which power source is greater; receiving a signal from the comparator and selecting the supplemental power source as a power feed when the main power source is depleted; and maintaining the voltage level from the supplemental power source at a predetermined level when the supplemental power source has been selected as the power feed . . . .”

[0583] Referring again to FIG. 1, and in one preferred embodiment thereof, the regulator 30 is operatively connected to controller 32 by means of a link 34, and the regulator 30 is comprised of an adjustable power supply whose output may be regulated in response to signals fed to such regulator 30 by controller 32.

[0584] One may use any of the implantable power supplies known to those in the art as regulator 32. Thus, e.g., one may use the biologically implantable and energized power supply disclosed in U.S. Pat. No. 3,563,245, the entire disclosure of which is hereby incorporated by reference into this specification.

[0585] Thus, by way of further illustration, one may use the power supply disclosed in U.S. Pat. No. 3,757,795, the entire disclosure of which is hereby incorporated by reference into this specification. Claim 6 of this patent describes: “6. Implantable electrical medical apparatus including circuit means for developing electrical signals for stimulating selected portions of a body, comprising: electrically redundant power supply means having a pair of supply junctions; means connecting said circuit means to said supply junctions; voltage doubling means having first and second output terminals adapted to be connected to a body for electrical stimulation thereof; said voltage doubling means including a capacitor having a pair of plates; means connecting one of said plates to one of said supply junctions; means connecting the other of said plates to said first output terminal; means connecting said second output terminal to the other supply junction; electrical switch means connecting said one plate to said other supply junction; further electrical switch means connecting said second output terminal to said one supply junction; and all said switch means being connected to said circuit means and including means for selectably reversing the polarity of electrical energy to said capacitor.”

[0586] By way of yet further illustration, one may use the power supply disclosed in U.S. Pat. No. 4,143,661, the entire disclosure of which is hereby incorporated by reference into this specification. As is disclosed in the abstract of this patent, “A power supply system to operate an implanted electric-powered device such as a blood pump. A secondary coil having a biocompatible covering is implanted to subcutaneously encircle either the abdomen or the thigh at a location close to the exterior skin. The secondary coil is electrically interconnected with an implanted storage battery and the blood pump. A primary coil of overlapping width is worn by the patient at a location radially outward of the secondary coil. An external battery plus an inverter circuit in a pack is attached to a belt having a detachable buckle connector which is conventionally worn about the waist. Efficient magnetic coupling is achieved through the use of two air-core windings of relatively large diameter.”

[0587] In the specification of U.S. Pat. No. 4,143,661, some of the preferred embodiments of the invention of such patent are discussed. It is disclosed that: “This invention relates to electric power supplies and more particularly to a power supply for a device which is implanted within a living body and a method for operation thereof. The relatively high amount of power required by circulatory support devices, such as a partial or total artificial heart, has rendered most implantable, self-sufficient energy sources inapplicable, such as those used for a pacemaker. Only high-power, radioisotope heat sources have held any promise of sustained outputs of several watts; however, the utilization of such an energy source has been complicated by its inherent need for a miniature, high efficiency heat engine, as well as by serious radiation-related problems. All other practical approaches to powering an artificial heart or circulatory assist system of some type necessarily depend on a more or less continuous flow of energy from outside the body. Results of early efforts at infection-free maintenance of long-term percutaneous connections were discouraging and thus highlighted the desirability, at least for the long term, of powering such an implanted device though intact skin.”

[0588] As is also disclosed in U.S. Pat. No. 4,143,661, “One of the earliest approaches to the transmission of energy across intact skin involves the generation of a radio frequency field extending over a substantial area of the body, such that significant power could be extracted from coils located in the vicinity of the implanted power-consuming device itself. Placement of substantial amounts of ferrite materials within such coils to permit the capture of a greater proportion of the incident field was also investigated, as reported in the article by J. C. Schuder et al. in the 1964 Transactions ACEMB. However, difficulty has been experienced in reconciling the conflicting requirement of magnetic circuit geometry with a surgically feasible, variable tissue structure. In another proposed alternative design, a secondary coil is implanted in such a manner that the center of the coil remains accessible through a surgically constructed tunnel of skin; however, such devices have not yielded satisfactory performance. Predominant failure modes included necrosis of the skin tunnel tissue caused by mechanical pressure and excess heat generation—see the 1975 report of I.I.T. Research Institute, by Brueschke et al., N.I.H. Report No. NO1-HT-9-2125-3, page 25.”

[0589] U.S. Pat. No. 4,143,661 also discloses that: “As a result of the present invention, it has been found that a satisfactory system can be achieved by the employment of a secondary coil which is implanted just below the skin of the abdomen or the thigh so that it encircles the body member along most of its length and lies at a location close to the skin. The system includes an implanted storage battery plus the necessary interconnections between the secondary coil, the battery and the electric-powered device, which will likely be a circulatory assist device of some type. A primary coil, in the form of an encircling belt which is greater in width than the secondary implanted coil, fits around the body member in the region just radially outward thereof. A portable external A.C. power source, usually a rechargeable battery plus an appropriate inverter, is in electrical connection with the primary coil. These coils function efficiently as an air-core transformer and sufficient power is transcutaneously supplied via the secondary coil to both operate the device and charge the implanted storage battery.”

[0590] By way of yet further illustration, one may use the power supply described in U.S. Pat. No. 4,665,896, the entire disclosure of which is hereby incorporated by reference into this specification. This patent claims: “1. In an implanted blood pump system wherein power for driving the pump is provided by a transcutaneous transformer having an external primary winding means and an implanted secondary winding means and shunt regulator means for controlling the driving voltage applied to the pump, a method for regulating the driving voltage applied to the primary winding means, comprising, sensing the power factor in the primary winding means, comparing the sensed power factor to a predetermined power factor level selected to correspond with a desired pump driving voltage, and adjusting the voltage level in the primary winding means to substantially equalize the sensed power factor and the predetermined power factor level.”

[0591] By way of yet further illustration, one may use the surgically implanted power supply described in U.S. Pat. No. 5,702,430, the entire disclosure of which is hereby incorporated by reference into this specification. This patent claims: “1. A surgically implantable power supply comprising battery means for providing a source of power, charging means for charging the battery means, enclosure means isolating the battery means from the human body, gas holding means within the enclosure means for holding gas generated by the battery means during charging, seal means in the enclosure means arranged to rapture when the internal gas pressure exceeds a certain value and inflatable gas container means outside the enclosure means to receive gas from within the enclosure means when the seal means has been ruptured.” As is discussed in the specification of this patent, a rectifier device may be used with the claimed assembly. Thus, e.g., it is disclosed that: “Power for the internal battery charging circuit is obtained via a subcutaneous secondary coil 230. This coil is connected to a capacitor/rectifier circuit 231 that is tuned to the carrier frequency being transmitted transcutaneously to the secondary coil 230. The rectifier may incorporate redundant diodes and a fault detection circuit as shown, which operates similar to the power transistor bridge 222 and logic circuit 223 of FIG. 9(a), except that the power transistors are replaced by diodes. This tuned capacitor/rectifier circuit may also incorporate a filter arrangement 211 to support serial communication interface (SCI) reception via the secondary coil 230. A level detection comparator 232 is provided to convert the analog signal produced by the filter 211 into a digital signal compatible with an SCI receiver 460. A power transistor 233 or other modulation device may also be incorporated to support SCI transmission via the secondary coil 230. A redundant transistor bridge such as the bridge 222 used for PWM current limiting may be used in place of the transistor 233 for improved fault tolerance. This SCI interface provides for changing programmable settings used by the control algorithm and monitoring of analog inputs to the microcontroller such as ECG1, ECG2, MCH1, CUR1, CUR2, TEMP, V1, and V2.”

[0592] By way of yet further illustration, one may use the power supply disclosed in U.S. Pat. No. 5,949,632, the entire disclosure of which is hereby incorporated by reference into this specification. This patent claims: “Power for the internal battery charging circuit is obtained via a subcutaneous secondary coil 230. This coil is connected to a capacitor/rectifier circuit 231 that is tuned to the carrier frequency being transmitted transcutaneously to the secondary coil 230. The rectifier may incorporate redundant diodes and a fault detection circuit as shown, which operates similar to the power transistor bridge 222 and logic circuit 223 of FIG. 9(a), except that the power transistors are replaced by diodes. This tuned capacitor/rectifier circuit may also incorporate a filter arrangement 211 to support serial communication interface (SCI) reception via the secondary coil 230. A level detection comparator 232 is provided to convert the analog signal produced by the filter 211 into a digital signal compatible with an SCI receiver 460. A power transistor 233 or other modulation device may also be incorporated to support SCI transmission via the secondary coil 230. A redundant transistor bridge such as the bridge 222 used for PWM current limiting may be used in place of the transistor 233 for improved fault tolerance. This SCI interface provides for changing programmable settings used by the control algorithm and monitoring of analog inputs to the microcontroller such as ECG1, ECG2, MCH1, CUR1, CUR2, TEMP, V1, and V2.”

[0593] By way of yet further illustration, one may use the power supply described in U.S. Pat. No. 5,954,058, the entire disclosure of which is hereby incorporated by reference into this specification. This patent claims: “A rechargeable electrically powered implantable infusion pump and power unit therefor, for intracorporeally dispensing a liquid in a body of a living being, with said infusion pump and power until therefor being capable of subcutaneous implantation in said body of said living being, said infusion pump and power unit comprising:

[0594] A. a rigid or semi-rigid outer pump housing; B. a flexible liquid storage chamber inside said outer-pump housing for containing a liquid to be dispensed intracorporeally in the body of said being by said infusion pump, said liquid storage chamber having a variable volume and a transcutaneously accessible self-sealing inlet and outlet port in communication with said outer-pump housing, such that said liquid can alternatively be introduced into said chamber through said port to refill said chamber, and be pumped out of said chamber through said port upon actuation of electrically powered infusion pump means for intracorporeally dispensing said liquid in the body of said being; C. electrically powered infusion pump means for causing said liquid to be pumped out of said liquid storage chamber through said port thereof and dispensed within said body of said living being upon actuation of said infusion pump means; D. a charging fluid storage chamber at least in part surrounding said liquid storage chamber and containing a two phase charging fluid, wherein the liquid phase to gas phase ratio of said charging fluid is representative of a store of potential energy in the form of physical phase transition/pressure energy which is transferrable into kinetic energy upon the physical phase transition of said charging fluid due to the vaporization of said charging fluid form its liquid phase to its vapor phase; E. rechargeable electrical energy source means contained within said outer-pump housing, for rechargeably receiving and storing electrical energy and for supplying said stored electrical energy to power said infusion pump means; and F. energy converter means in communication with both said charging fluid storage chamber and said rechargeable electrical energy source means, and contained within said outer-pump housing, for converting the released physical phase transition/pressure potential energy of said charging fluid to said electrical energy and for supplying said electrical energy to said rechargeable electrical energy source means.”

[0595] By way of yet further illustration, one may use the adjustable power supply described in U.S. Pat. No. 6,141,583, the entire disclosure of which is hereby incorporated by reference into this specification. As is discussed in the abstract of this patent, there is disclosed “A method or apparatus for conserving power in an implantable medical device (IMD) of the type having at least one IC powered by a battery wherein, in each such IC, a voltage dependent oscillator for providing oscillator output signals at an oscillation frequency dependent upon applied supply voltage to the IC is incorporated into the IC. The voltage dependent oscillator oscillates at a frequency that is characteristic of the switching speed of all logic circuitry on the IC die that can be attained with the applied supply voltage. The applied supply voltage is regulated so that the oscillation frequency is maintained at no less than a target or desired oscillation frequency or within a desired oscillation frequency range. The power supply voltage that is applied to the IC is based directly on the performance of all logic circuitry of the IC. In order to provide the comparison function, the oscillator output signals are counted, and the oscillator output signal count accumulated over a predetermined number of system clock signals is compared to a target count that is correlated to the desired oscillation frequency. The counts are compared, and the supply voltage is adjusted upward or downward or is maintained the same dependent upon whether the oscillator output signal count falls below or rises above or is equal to the target count, respectively. The supply voltage adjustment is preferably achieved employing a digitally controlled power supply by calculating a digital voltage from the comparison of the oscillator output signal count to the target count, and storing the digital voltage in a register of the power supply.”

[0596] Referring again to FIG. 1, and in the preferred embodiment depicted therein, the generator 26, in one embodiment, produces alternating current This alternating current is fed via line 28 to regulator 30, which preferably converts the alternating current to direct current and either feeds it in a first direction via line 36 to metallic stent 16, or feeds it in another direction via line 38 to metallic stent 16. As will be apparent to those skilled in the art, the regulator 26 thus has the capability of producing a magnetic field of a first polarity (when the direct current is fed in a first direction 36) or a second polarity (when the direct current is fed in a second direction 38), as dictated by the well-known Lenz's law.

[0597] In one embodiment, the regulator 26 is capable not only of changing the direction of the electrical current, but also its amount. It preferably is comprised of a variable resistance circuit that can modulate its output.

[0598] In the preferred embodiment depicted, the regulator 26 is comprised of a transceiver (not shown) whose antenna 40 is in telemetric contact with a controller 32. The controller 32 is preferably in telemetric contact with biosensors 42, 44, 46, and/or 48; and, depending upon the information received from one or more of such sensors, can direct the regulator 30 to increase the production of electrical current in one direction, or another, to decrease the production of electrical current in one direction, or another, or to cease the production of electrical current in one direction or another.

[0599] Biosensors 42, 44, 46, and/or 48 may be one or more of the implantable biosensors known to those skilled in the art.

[0600] In one embodiment, one of such sensors 42, 44, 46, and/or 48 can determine the extent to which two recognition molecules have bound to each other. Thus, e.g., one may use the process and apparatus described in U.S. Pat. No. 5,376,556, in which an analyte-mediated ligand binding event is monitored; the entire disclosure of this United States patent is hereby incorporated by reference into this specification. Claim 1 of this patent describes “A method for determining the presence or amount of an analyte, if any, in a test sample by monitoring an analyte-mediated ligand binding event in a test mixture the method comprising: forming a test mixture comprising the test sample and a particulate capture reagent, said particulate capture reagent comprising a specific binding member attached to a particulate having a surface capable of inducing surface-enhanced Raman light scattering and also having attached thereto a Raman-active label wherein said specific binding member attached to the particulate is specific for the analyte, an analyte-analog or an ancillary binding member; providing a chromatographic material having a proximal end and a distal end, wherein the distal end of said chromatographic material comprises a capture reagent immobilized in a capture situs and capable of binding to the analyte; applying the test mixture onto the proximal end of said chromatographic material; allowing the test mixture to travel from the proximal end toward the distal end by capillary action; illuminating the capture situs with a radiation sufficient to cause a detectable Raman spectrum; and monitoring differences in spectral characteristics of the detected surface-enhanced Raman scattering spectra, the differences being dependent upon the amount of analyte present in the test mixture.”

[0601] By way of further illustration, one may use the “triggered optical sensor” described and claimed in U.S. Pat. No. 6,297,059, the entire disclosure of which is hereby incorporated by reference into this specification. This patent claims (in claim 1) thereof “ . . . An optical biosensor for detection of a multivalent target biomolecule comprising: a substrate having a fluid membrane thereon; recognition molecules situated at a surface of said fluid membrane, said recognition molecule capable of binding with said multivalent target biomolecule and said recognition molecule linked to a single fluorescence molecule and as being movable upon said surface of said fluid membrane; and, a means for measuring a change in fluorescent properties in response to binding between multiple recognition molecules and said multivalent target biomolecule.” In column 1 of this patent, other biological sensors are discussed, it being stated that: “Biological sensors are based on the immobilization of a recognition molecule at the surface of a transducer (a device that transforms the binding event between the target molecule and the recognition molecule into a measurable signal). In one prior approach, the transducer has been sensitive to any binding, specific or non-specific, that occurred at the transducer surface. Thus, for surface plasmon resonance or any other transduction that depended on a change in the index of refraction, such sensors have been sensitive to both specific and non-specific binding. Another prior approach has relied on a sandwich assay where, for example, the binding of an antigen by an antibody has been followed by the secondary binding of a fluorescently tagged antibody that is also in the solution along with the protein to be sensed. In this approach, any binding of the fluorescently tagged antibody will give rise to a change in the signal and, therefore, sandwich assay approaches have also been sensitive to specific as well as non-specific binding events. Thus, selectivity of many prior sensors has been a problem. Another previous approach where signal transduction and amplification have been directly coupled to the recognition event is the gated ion channel sensor as described by Cornell et al., ‘A Biosensor That Uses Ion-Channel Switches’, Nature, vol. 387, Jun. 5, 1997. In that approach an electrical signal was generated for measurement. Besides electrical signals, optical biosensors have been described in U.S. Pat. No. 5,194,393 by Hugl et al. and U.S. Pat. No. 5,711,915 by Siegmund et al. In the later patent, fluorescent dyes were used in the detection of molecules.”

[0602] By way of yet further illustration, one may use the sensor element disclosed in U.S. Pat. No. 6,589,731, the entire disclosure of which is hereby incorporated by reference into this specification. This patent, at column 1 thereof, also discusses biosensors, stating that: “Biosensors are sensors that detect chemical species with high selectivity on the basis of molecular recognition rather than the physical properties of analytes. See, e.g., Advances in Biosensors, A. P. F. Turner, Ed. JAI Press, London, (1991). Many types of biosensing devices have been developed in recent years, including enzyme electrodes, optical immunosensors, ligand-receptor amperometers, and evanescent-wave probes. The detection mechanism in such sensors can involve changes in properties such as conductivity, absorbance, luminescence, fluorescence and the like. Various sensors have relied upon a binding event directly between a target agent and a signaling agent to essentially turn off a property such as fluorescence and the like. The difficulties with present sensors often include the size of the signal event which can make actual detection of the signal difficult or affect the selectivity or make the sensor subject to false positive readings. Amplification of fluorescence quenching has been reported in conjugated polymers. For example, Swager, Accounts Chem. Res., 1998, v. 31, pp. 201-207, describes an amplified quenching in a conjugated polymer compared to a small molecule repeat unit by methylviologen of 65; Zheng et al., J. Appl. Polymer Sci., 1998, v. 70, pp. 599-603, describe a Stern-Volmer quenching constant of about 1000 for poly(2-methoxy,5-(2′-ethylhexloxy)-p-phenylene-vinylene (MEH-PPV) by fullerenes; and, Russell et al., J. Am. Chem. Soc., 1982, v.103, pp. 3219-3220, describe a Stern-Volmer quenching constant for a small molecule (stilbene) in micelles of about 2000 by methylviologen. Despite these successes, continued improvements in amplification of fluorescence quenching have been sought. Surprisingly, a KSV of greater than 105 has now been achieved.”

[0603] Similarly, and by way of further illustration, one may use the light-based sensors discussed at column 1 of U.S. Pat. No. 6,594,011, the entire disclosure of which is hereby incorporated by reference into this specification. As is disclosed in such column 1, “It is well known that the presence or the properties of substances on a material's surface can be determined by light-based sensors. Polarization-based techniques are particularly sensitive; ellipsometry, for example, is a widely used technique for surface analysis and has successfully been employed for detecting attachment of proteins and smaller molecules to a surface. In U.S. Pat. No. 4,508,832 to Carter, et al. (1985), an ellipsometer is employed to measure antibody-antigen attachment in an immunoassay on a test surface. Recently, imaging ellipsometry has been demonstrated, using a light source to illuminate an entire surface and employing a two-dimensional array for detection, thus measuring the surface properties for each point of the entire surface in parallel (G. Jin, R. Janson and H. Arwin, “Imaging Ellipsometry Revisited: Developments for Visualization of Thin Transparent Layers on Silicon Substrates,” Review of Scientific Instruments, 67(8), 2930-2936, 1996). Imaging methods are advantageous in contrast to methods performing multiple single-point measurements using a scanning method, because the status of each point of the surface is acquired simultaneously, whereas the scanning process takes a considerable amount of time (for example, some minutes), and creates a time lag between individual point measurements. For performing measurements where dynamic changes of the surface properties occur in different locations, a time lag between measurements makes it difficult or impossible to acquire the status of the entire surface at any given time. Reported applications of imaging ellipsometry were performed on a silicon surface, with the light employed for the measurement passing through ₊the surrounding medium, either air or a liquid contained in a cuvette. For applications where the optical properties of the surrounding medium can change during the measurement process, passing light through the medium is disadvantageous because it introduces a disturbance of the measurement.”

[0604] U.S. Pat. No. 6,594,011 goes on to disclose (at columns 1-2) that: “By using an optically transparent substrate, this problem can be overcome using the principle of total internal reflection (TIR), where both the illuminating light and the reflected light pass through the substrate. In TIR, the light interacting with the substance on the surface is confined to a very thin region above the surface, the so-called evanescent field. This provides a very high contrast readout, because influences of the surrounding medium are considerably reduced. In U.S. Pat. No. 5,483,346 to Butzer, (1996) the use of polarization for detecting and analyzing substances on a transparent material's surface using TIR is described. In the system described by Butzer, however, the light undergoes multiple internal reflections before being analyzed, making it difficult or impossible to perform an imaging technique, because it cannot distinguish which of the multiple reflections caused the local polarization change detected in the respective parts of the emerging light beam. U.S. Pat. No. 5,633,724 to King, et al. (1997) describes the readout of a biochemical array using the evanescent field. This patent focuses on fluorescent assays, using the evanescent field to excite fluorescent markers attached to the substances to be detected and analyzed. The attachment of fluorescent markers or other molecular tags to the substances to be detected on the surface requires an additional step in performing the measurement, which is not required in the current invention. The patent further describes use of a resonant cavity to provide on an evanescent field for exciting analytes.”

[0605] By way of yet further illustration, one may use one or more of the biological sensors disclosed in U.S. Pat. No. 6,546,267 (biological sensor); U.S. Pat. No. 5,972,638 (biosensor); U.S. Pat. Nos. 5,854,863; 6,411,834 (biological sensor); U.S. Pat. No. 4,513,280 (device for detecting toxicants); U.S. Pat. Nos. 6,666,905; 5,205,292; 4,926,875; 4,947,854 (epicardial multifunctional probe); U.S. Pat. Nos. 6,523,392; 6,169,494 (biotelemetry locator); U.S. Pat. No. 5,284,146 (removable implanted device); U.S. Pat. Nos. 6,624,940; 6,571,125; 5,971,282; 5,766,934 (chemical and biological sensors having electroactive polymer thin films attached to microfabricated device and possessing immobilized indicator molecules); U.S. Pat. No. 6,607,480 (evaluation system for obtaining diagnostic information from the signals and data of medical sensor systems); U.S. Pat. Nos. 6,493,591; 6,445,861; 6,280,586; 5,327,225 (surface plasmon resonance sensor); and the like. The entire disclosure of each of these United States patents is hereby incorporated by reference into this specification.

[0606] By way of further illustration, one may use the implantable extractable probe described in U.S. Pat. No. 5,205,292, the entire disclosure of which is hereby incorporated by reference into this specification. This probe comprises a biological sensor attached to the body of the probe such as, e.g., a doppler transducer for measuring blood flow.

[0607] In one embodiment, the nanowire sensor described in published U.S. patent application US 2002/0117659 is used; the entire disclosure of this United States patent application is hereby incorporated by reference into this specification. As is disclosed in this published patent application, “The invention provides a nanowire or nanowires preferably forming part of a system constructed and arranged to determine an analyte in a sample to which the nanowire(s) is exposed. ‘Determine’, in this context, means to determine the quantity and/or presence of the analyte in the sample. Presence of the analyte can be determined by determining a change in a characteristic in the nanowire, typically an electrical characteristic or an optical characteristic. E.g. an analyte causes a detectable change in electrical conductivity of the nanowire or optical properties. In one embodiment, the nanowire includes, inherently, the ability to determine the analyte. The nanowire may be functionalized, i.e. comprising surface functional moieties, to which the analytes binds and induces a measurable property change to the nanowire. The binding events can be specific or non-specific. The functional moieties may include simple groups, selected from the groups including, but not limited to, —OH, —CHO, —COOH, —SO₃H, —CN, —NH₂, SH, —COSH, COOR, halide; biomolecular entities including, but not limited to, amino acids, proteins, sugars, DNA, antibodies, antigens, and enzymes; grafted polymer chains with chain length less than the diameter of the nanowire core, selected from a group of polymers including, but not limited to, polyamide, polyester, polyimide, polyacrylic; a thin coating covering the surface of the nanowire core, including, but not limited to, the following groups of materials: metals, semiconductors, and insulators, which may be a metallic element, an oxide, an sulfide, a nitride, a selenide, a polymer and a polymer gel. In another embodiment, the invention provides a nanowire and a reaction entity with which the analyte interacts, positioned in relation to the nanowire such that the analyte can be determined by determining a change in a characteristic of the nanowire.”

[0608] A drug delivery device that is comprised of a biological sensor is disclosed in published United States patent application US 2002/0011601, the entire disclosure of which is hereby incorporated by reference into this specification. As is disclosed in the “Abstract” of this published patent application, “An Implantable Medical Device (IMD) for controllably releasing a biologically-active agent such as a drug to a body is disclosed. The IMD includes a catheter having one or more ports, each of which is individually controlled by a respective pair of conductive members located in proximity to the port. According to the invention, a voltage potential difference generated across a respective pair of conductive members is used to control drug delivery via the respective port. In one embodiment of the current invention, each port includes a cap member formed of a conductive material. This cap member is electrically coupled to one of the conductive members associated with the port to form an anode. The second one of the conductive members is located in proximity to the port and serves as a cathode. When the cap member is exposed to a conductive fluid such as blood, a potential difference generated between the conductors causes current to flow from the anode to the catheter, dissolving the cap so that a biologically-active agent is released to the body. In another embodiment of the invention, each port is in proximity to a reservoir or other expandable member containing a cross-linked polymer gel of the type that expands when placed within an electrical field. Creation of an electric field between respective conductive members across the cross-linked polymer gel causes the gel to expand. In one embodiment, this expansion causes the expandable member to assume a state that blocks the exit of the drug from the respective port. Alternatively, the expansion may be utilized to assert a force on a bolus of the drug so that it is delivered via the respective port. Drug delivery is controlled by a control circuit that selectively activates one or more of the predetermined ports.”

[0609] At column 1 of published U.S. patent application US 2002/0111601, reference is made to other implantable drug delivery systems. It is disclosed that (in paragraph 0004) that “While implantable drug delivery systems are known, such systems are generally not capable of accurately controlling the dosage of drugs delivered to the patient. This is particularly essential when dealing with drugs that can be toxic in higher concentrations. One manner of controlling drug delivery involves using electro-release techniques for controlling the delivery of a biologically-active agent or drug. The delivery process can be controlled by selectively activating the electro-release system, or by adjusting the rate of release. Several systems of this nature are described in U.S. Pat. Nos. 5,876,741 and 5,651,979 which describe a system for delivering active substances into an environment using polymer gel networks. Another drug delivery system is described in U.S. Pat. No. 5,797,898 to Santini, Jr. which discusses the use of switches provided on a microchip to control the delivery of drugs. Yet another delivery device is discussed in U.S. Pat. No. 5,368,704 which describes the use of an array of valves formed on a monolithic substrate that can be selectively activated to control the flow rate of a substance through the substrate.” The disclosures of each of U.S. Pat. Nos. 5,368,704, 5,797,898, and 5,876,741 are hereby incorporated by reference into this specification.

[0610] In one embodiment, and referring again to FIG. 1, sensor 36 is an electromagnetic flow meter that, as is known to those skilled in the art, is an instrument which is used to qualitatively measure flow velocity. Reference may be had to a text by J. A. Tuszynski et al., “Biomedical Applications of Introductory Physics” (John Wiley & Sons, Inc., New York, N.Y., 2001), at page 260.

[0611] FIG. 2 is a schematic diagram of an electromagnetic flow meter applied to an artery; this Figure is adapted from page 261 of the aforementioned Tuszynski et al. text.

[0612] Referring such FIG. 2, it will be seen that blood (not shown) flows through artery 100 in the direction of arrow 102. A first signal electrode 102 at a first voltage potential is electrically connected to a second signal electrode (not shown) at a second voltage potential. A magnetic field in the direction of arrows is created by magnet 108. As blood flows in the direction of arrow 102 and between the first signal electrode 102 and the second signal electrode (not shown), a current is induced by such flow, and such current is measured by a galvanometer (not shown) that is part of the sensor 36 (see FIG. 1).

[0613] In addition to the device depicted in FIG. 2, or instead of such device, one may use one or more of the implantable flow meters known to the prior art. Thus, e.g., one may use one or more of the implantable flow meters disclosed in U.S. Pat. No. 4,915,113 (method and apparatus for monitoring the patency of vascular grants); U.S. Pat. No. 6,458,086 (implantable blood flow monitoring system); U.S. Pat. No. 6,668,197 (treatment using implantable devices); U.S. Pat. No. 6,824,480 (monitoring treatment using implantable telemetric sensors); and the like. The entire disclosure of each of these United States patents is hereby incorporated by reference into this specification.

[0614] By way of further illustration, claim 1 of U.S. Pat. No. 4,915,113 describes: an

[0615] “Implantable flow meter apparatus for monitoring vascular graft patency comprising: (a) at least one ring member for surrounding a blood vessel graft intermediate its ends, said at least one ring member supporting transducer means thereon to define an axis extending internal of said blood vessel graft when said at least one ring member is installed on said blood vessel graft; (b) implantable electrical means positionable subcutaneously at a predetermined access site displaced from said one at least one ring member; (c) conductor means coupling said transducer means to said electrical means; and (d) barrier patch means having an area much greater than the cross-sectional area of said conductor means, said conductor means passing generally through the center of said patch means for inhibiting passage of infection producing organisms from said access site along said conductor means.”

[0616] Referring again to FIG. 1, and in the preferred embodiment depicted, a growth of plaque 41 is shown. As will be apparent, and for the sake of simplicity of representation, the plaque 41 is shown on only one portion of the stent 30.

[0617] As is known to those in the art, and as is illustrated at page 135 of the Tuszynski et al. text (see problem 11.9), when a segment of an artery is narrowed down by arterisclerotic plaque to one fifth of its cross-sectional area, the velocity increases five times; but the blood pressure increases about 1 percent.

[0618] Thus, e.g., if one were to use the flow-meter depicted in FIG. 2, and assuming a magnetic field of about 10 Gauss, a blood flow rate of about 20 centimeters per second, a diameter of the artery 100 of about 1 centimeter, the voltage difference between the first electrode 104 and the second electrode (not show) will be about 1.5 millivolts; and the current flow will be proportional to the resistance in the circuit formed by the two electrodes. With, e.g., a 5 ohm resistance, the current would be about 0.3 milliamperes.

[0619] Referring again to FIG. 1, when such current of about 0.3 milliamperes is detected by the sensor 42, such information is preferably transmitted by such sensor 42 to the controller 32. The controller 32 then can determine, based upon this information and other information, to what extent, if any, it wishes to change the activity of regulator 30.

[0620] Referring again to FIG. 1, and in the embodiment depicted, the stent 16 also is preferably comprised of sensors 44, 46, and 48. One or more of these sensors may be adapted to detect the amount of anti-mitotic agent in the bloodstream.

[0621] Referring again to FIG. 1, and to the preferred embodiment depicted therein, particles of magnetic anti-mitotic agent 14 are fed into the artery 11 by means of source 50. These magnetic particles are directed by an externally applied magnetic field 52 towards the stent 16. As will be apparent, the stent 16 will also have a magnetic moment, depending upon the direction in which current is fed from regulator 30 to the stent 16. When the magnetic moment of the stent is opposite to that of the magnetic anti-mitotic particles 14, the anti-mitotic particles are attracted to the stent 16; when the magnetic moment of the stent 16 is the same as that of the anti-mitotic particles 14, the anti-mitotic particles are directed to the stent. Thus, the controller 32 can control the extent to which, if any, the stent 16 attracts and/or repels the magnetic anti-mitotic particles in its vicinity.

[0622] Similarly, when externally applied magnetic field 52 has a magnetic moment that is opposite to that of the magnetic particles, these particles can be driven towards the stent; and they can be pulled from the stent when the externally applied magnetic field has an opposite orientation.

[0623] Thus, there are two separate factors that can be varied to either draw the magnetic anti-mitotic particles towards the stent, or to repel such anti-mitotic particles from the stent: the strength and orientation of the magnetic field of the stent (which is controllable via regulator 30), and the strength and orientation of the externally applied magnetic field 52.

[0624] One may use any of prior art means for externally applying magnetic field 52. Thus, and referring to published United States patent application 2004/0030379, the entire disclosure of which is hereby incorporated by reference into this specification, “An external electromagnetic source or field may be applied to the patient having an implanted coated medical device using any method known to skilled artisan. In the method of the present invention, the electromagnetic field is oscillated. Examples of devices which can be used for applying an electromagnetic field include a magnetic resonance imaging (“MRI”) apparatus. Generally, the magnetic field strength suitable is within the range of about 0.50 to about 5 Tesla (Webber per square meter). The duration of the application may be determined based on various factors including the strength of the magnetic field, the magnetic substance contained in the magnetic particles, the size of the particles, the material and thickness of the coating, the location of the particles within the coating, and desired releasing rate of the biologically active material.”

[0625] Published United States patent application 2004/0030379 also disclose that “In an MRI system, an electromagnetic field is uniformly applied to an object under inspection. At the same time, a gradient magnetic field, superposing the electromagnetic field, is applied to the same. With the application of these electromagnetic fields, the object is applied with a selective excitation pulse of an electromagnetic wave with a resonance frequency which corresponds to the electromagnetic field of a specific atomic nucleus. As a result, a magnetic resonance (MR) is selectively excited. A signal generated is detected as an MR signal. See U.S. Pat. No. 4,115,730 to Mansfield, U.S. Pat. No. 4,297,637 to Crooks et al., and U.S. Pat. No. 4,845,430 to Nakagayashi. For the present invention, among the functions of the MRI apparatus, the function to create an electromagnetic field is useful for the present invention. The implanted medical device of the present can be located as usually done for MRI imaging, and then an electromagnetic field is created by the MRI apparatus to facilitate release of the biologically active material. The duration of the procedure depends on many factors, including the desired releasing rate and the location of the inserted medical device. One skilled in the art can determine the proper cycle of the electromagnetic field, proper intensity of the electromagnetic field, and time to be applied in each specific case based on experiments using an animal as a model.”

[0626] Published United States patent application 2004/0030379 also disclose that “In addition, one skilled in the art can determine the excitation source frequency of the electromagnetic energy source. For example, the electromagnetic field can have an excitation source frequency in the range of about 1 Hertz to about 300 kiloHertz. Also, the shape of the frequency can be of different types. For example, the frequency can be in the form of a square pulse, ramp, sawtooth, sine, triangle, or complex. Also, each form can have a varying duty cycle.”

[0627] Referring again to FIG. 1, and in the preferred embodiment depicted therein, a layer of drug eluting polymer 49 is present in the stent assembly; and this polymer may be used to either attract anti-mitotic agent into it, and/or to elute anti-mitotic agent out of it.

[0628] In one preferred embodiment, direct current electrical energy is delivered via lines 36/38 to stent assembly 16. In this embodiment, it is preferred that stent assembly 16 be comprised of conductive material, and that the stent also be comprised of wire-like struts (see, e.g., FIG. 1 of published United States patent application 2004/0030379).

[0629] As will be apparent, as the direct current flows through the conductive material, it creates a static magnetic field in accordance with the well-known Lenz's law. In one embodiment, with the blood flow that is typical through the blood vessels of human beings, magnetic fields on the order of about 1 Gauss can readily be created.

[0630] Referring again to FIG. 1, the stent assembly 16 is preferably comprised of a metallic stent body 16 and, disposed thereon, drug eluting polymer 49. The hydrodynamic forces caused by the flow of blood through the stent assembly 16 causes elution of particles 14 of anti-mitotic agent.

[0631] It is preferred that regulator 30 be comprised of either a half wave or a full wave rectifier so that the current flowing from regulator 30 be direct current, i.e., that such current flow in only one direction. As will be apparent with either “half-wave d.c.” and/or “full-wave d.c.” being fed to the stent 16, a magnetic field will be induced in such stent that will have a constant polarity but constantly varying intensity. Such a magnetic field with either consistently attract and/or repel the magnetic anti-mitotic particles 14, depending upon the magnetic polarity of such particles. In one preferred embodiment, the magnetized stent 16 consistently attracts the magnetic particles 14.

[0632] As will be apparent, the regulator is capable of varying the intensity and/or polarity of its output, preferably in response to a signal from the controller 32. The controller 32 is preferably equipped with an antenna 50 which is in telemetric contact with both the regulator 30 and the sensors 42, 44, 46, and 48.

[0633] The sensors 42, 44, 46, and 48 may be any of implantable biosensors known to those skilled in the art.

[0634] By way of illustration, and referring to U.S. Pat. No. 4,915,113 (the entire disclosure of which is hereby incorporated by reference into this specification), the sensor(s) may be a implantable Dopper flow meter apparatus for monitoring blood flow through a vascular graft. This patent claims: “1. Implantable flow meter apparatus for monitoring vascular graft patency comprising: (a) at least one ring member for surrounding a blood vessel graft intermediate its ends, said at least one ring member supporting transducer means thereon to define an axis extending internal of said blood vessel graft when said at least one ring member is installed on said blood vessel graft; (b) implantable electrical means positionable subcutaneously at a predetermined access site displaced from said one at least one ring member; (c) conductor means coupling said transducer means to said electrical means; and (d) barrier patch means having an area much greater than the cross-sectional area of said conductor means, said conductor means passing generally through the center of said patch means for inhibiting passage of infection producing organisms from said access site along said conductor means.”

[0635] The sensor(s) may comprise a means for sensing the strength of a magnetic field. As is disclosed in claim 4 of U.S. Pat. No. 5,562,714 (the entire disclosure of which is hereby incorporated by reference into this specification), the sensing means “ . . . comprises a sensing antenna having an electrical connection through diodes to a power supply so that the Q of said transmitting antenna is regulated by draw down of energy by said sense antenna through said diode connection to said power supply.

[0636] In one embodiment, depicted in FIG. 3, the energy fed via line 24 is direct-current electrical energy.

A Process for Predicting Mutation Type and Mutation Frequency

[0637] In one embodiment of applicants' invention, there is provided a process for predicting both the type and frequency of mutations in certain protein drug targets.

[0638] As is known to those skilled in the art, many mutations are “silent,” i.e., they do not result in amino acid changes in the protein being expressed. Put another way, a silent mutation is a mutation that does not result in a detectable phenotypic effect. A silent mutation may be due to a transition or a transversion that leads to synonym codon. Additionally, mutations can change a codon to code for an amino acid closely related in terms of shape, hydrophobicity or other properties to that coded for by the original codon. Reference may be had, e.g., to U.S. Pat. Nos. 5,240,846 5,639,650; 5,840,493 (mitochondrial DNA mutations); U.S. Pat. No. 5,976,798 (methods for detecting mitochondrial mutations); U.S. Pat. No. 6,010,908 (gene therapy by small fragment homologous replacement); U.S. Pat. No. 6,329,138 (method for the detection of antibiotic resistance); U.S. Pat. No. 6,344,356 (methods for recombining nucleic acids); U.S. Pat. No. 6,544,745 (diagnostic assay for diabetes); U.S. Pat. No. 6,699,479; and the like. The entire disclosure of each of these United States patents is hereby incorporated by reference into this specification.

[0639] An additional preferred embodiment is an algorithm using artificial intelligence or computer programs that improve their performance based on information gathered from previous cycles to predict which DNA bases are most likely to be mutated and result in important amino acid changes. This information can be derived empirically from data gathered by the sequencing of tubulin mutants from clinical samples of tumors.

[0640] As is also known to those skilled in the art, the active site of a protein is assembled from many amino acids that interact with the substrate of the enzymatic reaction or ligand binding reactions. In one embodiment of applicants' invention, one can anticipate which amino acid changes will result in a change in drug binding. In one aspect of this embodiment, one anticipates which amino acid changes result in changes in drug binding in paclitaxeal and, thereafter, designs drugs to bind to the modified binding sites. In this aspect, by utilizing such drugs in advance of the mutation event, or concurrently therewith, the incidence of selecting for resistant forms of cancer is minimized.

[0641] Applicants' process 200 is schematically illustrated in FIG. 3. In step 202 of the process, the structure of the target protein is obtained. The target protein may, e.g., be a beta-tubulin that is implicated in, e.g., certain drug resistance.

[0642] One may obtain the structure of the target protein by conventional or unconventional means. One, thus, may conduct conventional x-ray crystallography analysis of the protein in question. Alternatively, or additionally, one may obtain and/or confirm the structure of the protein in question by homology modeling, as is discussed elsewhere in this specification.

[0643] Thereafter, in step 204 of the process, the binding efficiency of a candidate drug to the target protein is predicted by conventional means. One may use the means disclosed in U.S. Pat. No. 5,854,992 (system and method for structure-based drug design that includes accurate prediction of binding free energy); U.S. Pat. No. 5,933,819 (prediction of relative biding moits of biologically active peptides and peptide mimetics); U.S. Pat. No. 6,226,603 (method for the prediction of binding targets and the design of ligands); U.S. Pat. No. 6,772,073 (method for prediction of binding targets and the design of ligands); and the like. The entire disclosure of each of these United States patents is hereby incorporated by reference into this specification.

[0644] By way of illustration, and referring to U.S. Pat. No. 5,854,992, such patent claims: “1. A method for building molecules for binding at a receptor site, comprising the steps of: (a) evaluating a receptor site for a molecular make up of at least a portion of the receptor site to which a molecule being grown will bind and generating at least a coordinate of at least a portion of the receptor site to which the molecule being grown will bind, and outputting, at least with respect to the molecular make up of the receptor site, the coordinate of the portion of the receptor site to which the molecule being grown will bind; (b) estimating free energy of the molecule being grown using knowledge-based potential data to estimate free energy and outputting the estimated free energy; and (c) building a molecule for binding to the receptor site using the outputs from steps (a) and (b), with the building step including building the molecule by selecting molecular fragments at orientations that will result in free energy estimates for the molecule that may be higher than a lowest free energy estimate possible for the molecule.”

[0645] Thereafter, in step 206 of the process, the key amino acids that are essential for the interaction of the target protein and the candidate drug are identified. This step also may be conducted by conventional means, such as evaluation of the results of the energy minimization analyses preferably conducted in step 204.

[0646] In step 208 of the process, a slight variation in the homology model is made in order to determine how the modified model will function. Thus, e.g., one may modify the target protein used in step 202, and then the process is repeated to determine the binding efficiency of the candidate drug (in step 204) for the modified target protein. The process is then repeated again, and again, until a multiplicity of sets of data are obtained with a multiplicity of different target proteins for the same drug.

[0647] This multiplicity of data will indicate which target protein the drug is most efficiently bound to the candidate drug, and which target protein is least efficiently bound to the target drug. The least efficiently bound target proteins are those proteins that, through natural selection of cells, might cause drug resistance to the candidate drug. Thus, in step 210, the data from repeated runs of process 200 is evaluated to determine which of the target proteins are least likely to bind to the candidate drug.

[0648] In step 212, the candidate drug is modified, and the modified drug is then tested again in the cycle of steps 202/204/206/208 to determine its binding efficiency with each of the target proteins initially evaluated as well as other modified target proteins.

[0649] This process may lead to other modified candidate drugs. The goal is to test for, and determine, the existence of a modified drug that has a high binding efficiency for all of the targeted protein structures.

[0650] As will be apparent, the process depicted in FIG. 3 may be used to determine drugs that may minimize drug resistance to anti-mitotic agents; and these “modified drugs” may be used either by themselves and/or in combination with the original cancer drug, depending upon the relative binding efficiencies with regard to particular target proteins and the extent to which the use of such drugs results in synergy. As will also be apparent, the process depicted in FIG. 3 may be used to determine drugs that may minimize other drug resistance caused by natural selection, such as antibiotic drug resistance. The process may also be used in cases of herbicide resistance, pesticide resistance, resistance to antiviral drugs, etc.

[0651] FIG. 4 is a flow diagram of one particular process 220 involving the design of anti-mitotic drugs and, in one embodiment thereof, combinations of antimitotic drugs. Referring to FIG. 4, and in step 222 thereof, the mutant proteins that are resistant to certain anti-mitotic agents are identified. These mutant proteins can be identified by conventional means such as, e.g., those means described hereinbelow, which relate to the identification of mutant tubulin isotypes.

[0652] Some of these mutant tubulin isotypes are discussed in published United States patent application 2004/0121351, the entire disclosure of which is hereby incorporated by reference into this specification. This published United States patent application discloses that: “The conservation of structure and regulatory functions among the β-tubulin genes in three vertebrate species (chicken, mouse and human) allowed the identification of and categorization into six major classes of beta-tubulin polypeptide isotypes on the basis of their variable carboxyterminal ends . . . . As tubulin molecules are involved in many processes and form part of many structures in the eucaryotic cell, they are possible targets for pharmaceutically active compounds. As tubulin is more particularly the main structural component of the microtubules it may act as point of attack for anticancer drugs such as vinblastin, colchicin, estramustin and taxol which interfere with microtubule function. The mode of action is such that cytostatic agents such as the ones mentioned above, bind to the carboxyterminal end the β-tubulin which upon such binding undergoes a conformational change. For example, Kavallaris et al. [Kavallaris et al. 1997, J. Clin. Invest. 100: 1282-1293] reported a change in the expression of specific β-tubulin isotypes (class I, II, III, and IVa) in taxol resistant epithelial ovarian tumor. It was concluded that these tubulins are involved in the formation of the taxol resistence. Also a high expression of class III β-tubulins was found in some forms of lung cancer suggesting that this isotype may be used as a diagnostic marker.”

[0653] The function of certain tubulins in paclitaxel resistance was also discussed in U.S. Pat. No. 6,362,321, the entire disclosure of which is hereby incorporated by reference into this specification. As is disclosed in this patent, “Taxol is a natural product derived from the bark of Taxus brevafolio (Pacific yew). Taxol inhibits microtubule depolymerization during mitosis and results in subsequent cell death. Taxol displays a broad spectrum of tumorcidal activity including against breast, ovary and lung cancer (McGuire et al., 1996, N. Engld. J. Med. 334:1-6; and Johnson et al., 1996, J. Clin. Ocol. 14:2054-2060). While taxol is often effective in treatment of these malignancies, it is usually not curative because of eventual development of taxol resistance. Cellular resistance to taxol may include mechanisms such as enhanced expression of P-glycoprotein and alterations in tubulin structure through gene mutations in the β chain or changes in the ratio of tubulin isomers within the polymerized microtubule (Wahl et al., 1996, Nature Medicine 2:72-79; Horwitz et al., 1993, Natl. Cancer Inst. 15:55-61; Haber et al., 1995, J. Biol. Chem. 270:31269-31275; and Giannakakou et al., 1997, J. Biol. Chem. 272:17118-17125) . . . ”

[0654] The increased presence of certain tubulin isotypes associated with certain types of cancers was noted in an article by Tien Yeh et al., “The B_{II} Isotype of Tubulin is Present in the Cell Nuclei of a Variety of Cancers,” Cell Motility and the Cytoskeleton 57:96-106 (2004). The Yeh et al. article discloses that both alpha-tubulin and beta-tubulin consist of a series of isotypes differing in amino acid sequence, each one encoded by a different gene; and it refers to a 1998 article by Richard F. Luduena entitled “The multiple forms of tubulin: different gene products and covalent modifications,” Int. Rev. Cytol 178:207-275. The Yeh et al. article also disclosed that the B_{II} isotype of tubulin is present in the nuclei of many tumors, stating that “Three quarters (75%) of the tumors we examined contained nuclear the B_{II} (Table I).” The authors of the Yeh et al. article suggest that (at page 104) “ . . . it would be interesting to explore the possibility of using nuclear B_{II} as a chemotherapeutic target.”

[0655] The aforementioned articles disclose several conventional means for identifying mutant proteins that are a cause, at least in part, of anti-mitotic drug resistance. Comparable means may be used to identify mutant proteins that are the cause of antibiotic drug resistance, vaccine resistance, herbicide resistance, pesticide resistance, antiviral drug resistance, and the like. In general, one may study specimens of drug resistant organisms to determine the existence of proteins that are preferentially expressed in the drug resistant organisms as compared with a comparable non-drug resistant organisms. Additionally, or alternatively, one may determine the existence of proteins that are preferentially expressed in the diseased organisms in order to determine whether such proteins are essential for the progress of the disease. Means for making such determinations are well documented in the patent literature. Reference may be had, e.g., to U.S. Pat. No. 5,853,995 (large scale genotyping of diseases); U.S. Pat. No. 6,162,604 (methods for determining genetic predisposition to autoimmune disease by genotyping apoptotic genes); U.S. Pat. No. 6,291,175 (methods for treating a neurological disease by determining BCHE genotype); U.S. Pat. No. 6,303,307 (large scale genotyping of disease); U.S. Pat. Nos. 6,355,859; 6,432,643 (method of determining Alzheimer's disease risk using apolipoprotein E4 genotype analysis); U.S. Pat. No. 6,573,049 (genotyping of the paraoxonase 1 gene for prognosing, diagnosing, and treating a disease); and the like. The entire disclosure of each of these United States patents is hereby incorporated by reference into this specification.

[0656] Referring again to FIG. 4, and in step 224 thereof, certain candidate drugs are then identified that will bind to the mutant proteins. This can be done with the process depicted in FIG. 3.

[0657] It is often the case that more than one mutant protein is present in cases of drug resistance. As is known, cancer often has a heterogeneous genotype in which different isotopes preferentially contain different drug-resistant proteins. In such a case, it is often desirable to determine not only which candidate drugs will bind to the particular mutant protein (see step 222), but also what combination of drugs will effectively bind to all the mutant proteins present in the heterogeneous genotype. Furthermore, one should also determine the concentration(s) and/or ratios of such drugs to maximize the possibility of a synergistic therapeutic effect.

[0658] After the identity and concentration of the drugs to be used has been determined, one can either administer these drugs simultaneously (in step 228) and/or administer these drugs sequentially (in step 230). Additionally, or alternatively, in step 232 one may administer non-drug therapy either the same time as the administration of the drug(s), and/or at one or more different times.

[0659] One may use one or more of non-drug anti-mitotic therapies that are known to those skilled in the art. Thus, e.g., in step 234 one may use hyperthermia. With the use of the magnetic anti-mitotic drugs discussed elsewhere in this specification, one may direct these drugs to the site of a tumor with the aid of an external electromagnetic field and thereafter, with the use of one or more other electromagnetic fields, cause such drug(s) to heat up to its Curie temperature and preferentially damage and/or destroy cancer cells. In one aspect of this embodiment, the Curie temperature of the magnetic anti-mitotic compound is less than about 41 degrees Celsius.

[0660] One may use radiation therapy in step 236. Thus, e.g., the magnetic anti-mitotic drug of this invention may contain a radioactive moiety, such as radioactive iron, or radioactive cobalt.

[0661] One may use ultrasound therapy is step 238. This step is described in more detail in the next section of this specification.

Treatment of In Vivo Tumors with High Frequency Energy

[0662] FIG. 5 is a flow diagram of a preferred process 260 for treating a biological organism with ultrasound, as set forth in step 238 of FIG. 4. In addition to the ultrasound energy, one may use other forms of mechanical energy, some of which are disclosed in published United States patent application 2004/0030379.

[0663] Referring to published United States patent application 2004/0030379, the entire disclosure of which is hereby incorporated by reference into this specification, “The mechanical vibrational energy source includes various sources which cause vibration such as ultrasound energy. Examples of suitable ultrasound energy are disclosed in U.S. Pat. No. 6,001,069 to Tachibana et al. and U.S. Pat. No. 5,725,494 to Brisken, PCT publications WO0016704, WO018468, WO0000095, WO0007508 and WO9933391, which are all incorporated herein by reference. Strength and duration of the mechanical vibrational energy of the application may be determined based on various factors including the biologically active material contained in the coating, the thickness of the coating, structure of the coating and desired releasing rate of the biologically active material.”

[0664] As is also disclosed in published United States patent application 2004/0030379, “Various methods and devices may be used in connection with the present invention. For example, U.S. Pat. No. 5,895,356 discloses a probe for transurethrally applying focused ultrasound energy to produce hyperthermal and thermotherapeutic effect in diseased tissue. U.S. Pat. No. 5,873,828 discloses a device having an ultrasonic vibrator with either a microwave or radio frequency probe. U.S. Pat. No. 6,056,735 discloses an ultrasonic treating device having a probe connected to an ultrasonic transducer and a holding means to clamp a tissue. Any of those methods and devices can be adapted for use in the method of the present invention.”

[0665] As is also disclosed in published United States patent application 2004/0030379, “Ultrasound energy application can be conducted percutaneously through small skin incisions. An ultrasonic vibrator or probe can be inserted into a subject's body through a body lumen, such as blood vessels, bronchus, urethral tract, digestive tract, and vagina. However, an ultrasound probe can be appropriately modified, as known in the art, for subcutaneous application. The probe can be positioned closely to an outer surface of the patient body proximal to the inserted medical device.”

[0666] As is also disclosed in published United States patent application 2004/0030379, “The duration of the procedure depends on many factors, including the desired releasing rate and the location of the inserted medical device. The procedure may be performed in a surgical suite where the patient can be monitored by imaging equipment. Also, a plurality of probes can be used simultaneously. One skilled in the art can determine the proper cycle of the ultrasound, proper intensity of the ultrasound, and time to be applied in each specific case based on experiments using an animal as a model.”

[0667] As is also disclosed in published United States patent application 2004/0030379, “In addition, one skilled in the art can determine the excitation source frequency of the mechanical vibrational energy source. For example, the mechanical vibrational energy source can have an excitation source frequency in the range of about 1 Hertz to about 300 kiloHertz. Also, the shape of the frequency can be of different types. For example, the frequency can be in the form of a square pulse, ramp, sawtooth, sine, triangle, or complex. Also, each form can have a varying duty cycle.

[0668] Referring again to FIG. 5, and in step 262 of this process, microtubules in diseased cells are preferably stabilized by one or more conventional means. Thus, e.g., one may effectuate such stabilization by using anti-mitotic or other chemical agents known to affect microtubules, or using chemicals that influence proteins that aid in the stabilization of microtubules (e.g. Rho or FAK), or a process of post-translational modification to the tubulin protein, until the half-life of an individual microtubule in the mitotic spindle of a dividing cell is an average of at least 8 minutes, or more than 10 percent of the microtubules in a non-dividing cell have a half-life of more than 8 minutes. One may use standard means for stabilizing the microtubules to this extent. Thus, e.g., reference may be had to U.S. Pat. No. 5,808,898 (method of stabilizing microtubules); U.S. Pat. Nos. 5,616,608; 6,403,635; 6,414,015 (laulimalide microtubule stabilizing agents); U.S. Pat. Nos. 6,429,232; 6,500,859 (method for treating atherosclerosis or restenosis using microtubule stabilizing agent); U.S. Pat. No. 6,660,767 (coumarin compounds as microtubules stabilizing agents); U.S. Pat. No. 6,740,751 (methods and compositions for stabilizing microtubules and intermediate filaments); and the like. The entire disclosure of each of these United States patents is hereby incorporated by reference into this specification.

[0669] In step 264 of this process, the resonant frequency of the stabilized microtubules in the diseased cells to be treated is determined. As used herein, the term “resonant frequency” is that frequency which, at a power level of 10 milliwatts per square centimeter, a temperature of 37 degrees Celsius, and atmospheric pressure, is sufficient to break at least 50 weight percent of the microtubules in the cell after an exposure time of five (5) minutes. That frequency which breaks the maximum number of microtubules under these conditions is the resonant frequency.

[0670] In this process, one may use any of the means for generating and focusing ultrasound energy that are known to those skilled in the art. Thus, e.g., one may use the ultrasound generator disclosed in U.S. Pat. No. 6,685,639, the entire disclosure of which is hereby incorporated by reference into this specification. This patent claims: “A high intensity focused ultrasound system, comprising: a controllable power supply; a B-mode ultrasound scanner; a therapeutic bed having a through hole; a liquid bag placed in the through hole and having opposite upper and lower portions, the lower portion of the liquid bag being attached to a combined probe, whereby a body portion of a patient lying immediately above the through hole may be scanned and treated by said system; and the combined probe comprising: a therapeutic head coupled to said controllable power supply for generating and focusing a ultrasound beam on a focal region at a temperature greater than 70 degrees centigrade, said therapeutic head comprising a ultrasound lens and piezoelectric ceramics coupled to said controllable power supply and disposed beneath the ultrasound lens, and an imaging probe coupled to said B-mode ultrasound scanner and mounted on a central axis of said therapeutic head so that the focal region of said therapeutic head is fixed at a predetermined location on a scanning plane; wherein said liquid bag contains vacuum degassed water having an acoustic impedance similar to that of human tissue, the upper portion of said liquid bag including an opening exposing said vacuum degassed water, said opening being open to an upper surface of said therapeutic bed so as said vacuum degassed water is adapted to be placed in direct contact with the skin of the patient's body portion; said system further comprising a multi-dimensional motional apparatus, on which the combined probe is mounted and which is moveable along three-dimensional rectangular coordinate axes and rotatable about one or two rotational coordinate axes, for driving said combined probe, said multidimensional motional apparatus includes a plurality of one-dimensional motional devices each being configured to either translate or rotate said combined probe in a specific direction.”

[0671] By way of yet further illustration, and not limitation, one may use one or more of the ultrasound generators described in U.S. Pat. No. 3,735,756 (duplex ultrasound generator); U.S. Pat. No. 4,718,421 (ultrasound generator); U.S. Pat. No. 4,957,100 (ultrasound generator and emitter); U.S. Pat. No. 4,976,255 (extracorporeal lithotripsy using shock waves and therapeutic ultrasound); U.S. Pat. Nos. 5,102,534; 5,184,065 (therapeutic ultrasound generator); U.S. Pat. No. 5,443,069 (therapeutic ultrasound applicator for the urogenital region); U.S. Pat. No. 6,270,342; and the like. The entire disclosure of each of these United States patents is hereby incorporated by reference into this specification.

[0672] By way of further illustration, one may also use the ultrasound generator disclosed in an article by article by I. Hrazdira et al., “Ultrasonically inducted altrations of cultured tumour cells,” European Journal of Ultrasound 8: 43-49, 1998. At page 45 of this article, is it disclosed that: “A laboratory generator operating at a frequency of 0.8 MHz was used as the source of continuous ultrasound.”

[0673] Applicants have discovered that the resonant frequency will vary with the square root of the average length of the microtubules in the cells being treated. They have also discovered that the microtubules in diseased cells do not necessarily have the same length as the microtubules in non-diseased cells. It is believed, e.g., that cancer cells have microtubules that are up to about 10 percent longer than the microtubules of comparable non-cancer cells.

[0674] Referring to FIG. 5, and to step 264 thereof, a series of experiments are preferably conducted with ultrasound waves with a power level of 10 milliwatts per square centimeter and different frequencies, at temperature of 37 degrees Celsius, and atmospheric pressure, and then the breakage of microtubules caused by such exposure is determined. That frequency which breaks the maximum number of microtubules is the resonant frequency.

[0675] One may determine the extent to which any particular ultrasound wave breaks microtubules by conventional means. Thus, e.g., one may use the means described in the aforementioned article by I. Hrazdira et al., in section 2.3 thereof. As is disclosed in such article, “For visualization of cytoskeleton components, an indirect immunofluorescence method was used. The cells in the monolayer were washed with phosphate buffer before adding 0.1% Triton for stabilization of membrane permeability. The cells were subsequently fixed by means of 3% paraformaldeyde. After fixation, secondary antibodies were added for 45 min. . . . for microtubules . . . . Between each operation, the cells were washed by PBS. Finally, samples for fluorescene microscopy were prepared . . . . A total of 20 microphotographs of each controal and experimental sample were evaluated anonymously . . . . Changes in cytoskeletal structure were evaluated quantitatively . . . .”

[0676] Referring again to FIG. 5, and in step 266 of the process, the stabilized microtubules are then contacted with ultrasound energy.

[0677] In one embodiment, the frequency of the ultrasound energy is approximately the resonant frequency, plus or minus about ten percent. In one aspect of this embodiment, the frequency of the ultrasound energy is approximately the resonant frequency, plus or minus about 5 percent. In general, such frequency will often be in the range of from about 100 kilohertz to about 500 kilohertz and, more preferably, from about 110 to about 200 kilohertz. In yet another embodiment, such frequency is from about 130 to about 170 kilohertz.

[0678] The power used for such exposure is preferably from about 1 to about 30 milliwatts per square centimeter and, more preferably, from about 5 to about 15 milliwatts per square centimeters.

[0679] At page 46 of the aforementioned Hrazdira et al. article, it was disclosed that “The disassembly of cytoskeleton components was not permanent. According to the time interval between sonication and cell fixation, a partial (at higher intensities) or total (at lower intensitivies) recovery of the cytoskeleton took place.” At page 49 of the Hradzdira et articles, it was disclosed that “We did not find any changes in the cells that could be entirely attributed to ultrasound action only. From the point of view of cytoskeletal alterations, ultrasound has to be considered as a non-specific stress factor.”

[0680] To help insure that applicants' process is more effective in causing permanent changes in the cell, an in step 268, the ultrasound excitation of the stabilized microtubules is ceased when the temperature of such microtubules reaches a specified temperature such as, e.g., a temperature of 70 degrees Celsius.

[0681] U.S. Pat. No. 6,685,639, the entire disclosure of which is hereby incorporated by reference into this specification, describes and claims “a high intensity focused ultrasound system for scanning and treating tumor” which creates a very high temperature (in excess of 70 degrees Celsius) in the area of the “focal region.” As is disclosed in column 3 of this patent, “By means of focusing, the system causes ultrasonic waves to form a space-point with high energy (focal region); the energy of the region reaches over 1000 W/M² and the temperature instaneously rises to greater than 70 degrees centigrade . . . .”

[0682] Applicants wish to avoid prolonged exposure of the cells of living organisms to a temperature in excess of a specified temperature, such as, e.g., 42 degrees Celsius. Thus, when the temperature of the microtubules reaches such specified temperature, and in step 268, the process of ultrasound excitation is repeated.

[0683] Thereafter, in step 270, step 266 (the contacting of the stabilized microtubules with ultrasound energy) is repeated until the temperature of the microtubules reaches the aforementioned maximum temperature, at which point step 268 is repeated (in step 272). The cycle is continued for as many times as is necessary to induce apoptosis.

[0684] In one embodiment, step 266 is conducted for from about 1 to about 5 minutes, the microtubules are allowed to cool, and then such step 266 is repeated again and again.

Nuclear Localization Sequences

[0685] U.S. Pat. No. 6,495,518, the entire disclosure of which is hereby incorporated by reference into this specification, describes the addition of “peptide localization sequences.” This patent, which is entitled “Method for importing biologically active molecules into cells, discloses that: “Peptides have been developed for many therapeutic uses. For example, diseases currently targeted by new peptide drugs include heart conditions, cancers, endocrine disorders, neurological defects, respiratory conditions, allergies and autoimmune diseases. Although the manufacture of known therapeutic peptides can be achieved by known methods, i.e., classic synthetic techniques or recombinant genetic engineering, delivery of the peptides into a cell has remained problematic, since they cannot readily cross biological membranes to enter cells. Thus, current methods include permeabilization of the cell membrane, or microinjection into the cell. Both of these methods have serious drawbacks. Permeabilization of cells, e.g., by saponin, bacterial toxins, calcium phosphate, electroporation, etc., can only be practically useful for ex vivo methods, and these methods cause damage to the cells. Microinjection requires highly skilled technicians (thus limiting its use to a laboratory setting), it physically damages the cells, and it has only limited applications as it cannot be used to treat for example, a mass of cells or an entire tissue, because one cannot feasibly inject large numbers of cells.”

[0686] U.S. Pat. No. 6,495,518 also discloses that: “Similarly, delivery of nucleic acids has been problematic. Methods currently employed include the permeabilization described above, with the above-described drawbacks, as well as vector-based delivery, such as with viral vectors, and liposome-mediated delivery. However, viral vectors can present additional risks to a patient, and liposome techniques have not achieved satisfactorily high levels of delivery into cells.”

[0687] U.S. Pat. No. 6,495,518 also discloses that “Signal peptide sequences . . . which share the common motif of hydrophobicity, mediate translocation of most intracellular secretory proteins across mammalian endoplasmic reticulum (ER) and prokaryotic plasma membranes through the putative protein-conducting channels.2-11 Alternative models for secretory protein transport also support a role for the signal sequence in targeting proteins to membranes . . . . Several types of signal sequence-mediated inside-out membrane translocation pathways have been proposed. The major model implies that the proteins are transported across membranes through a hydrophilic protein conducting channel formed by a number of membrane proteins.2-11 In eukaryotes, newly synthesized proteins in the cytoplasm are targeted to the ER membrane by signal sequences that are recognized generally by the signal recognition particle (SRP) and its ER membrane receptors. This targeting step is followed by the actual transfer of protein across the ER membrane and out of the cell through the putative protein-conducting channel (for recent reviews, see references 2-5). In bacteria, the transport of most proteins across the cytoplasmic membrane also requires a similar protein-conducting channel.7-11 On the other hand, signal peptides can interact strongly with lipids, supporting the proposal that the transport of some secretory proteins across cellular membranes may occur directly through the lipid bilayer in the absence of any proteinaceous channels . . . .”

[0688] U.S. Pat. No. 6,495,518 also discloses that “Thus, though many attempts have been made to develop effective methods for importing biologically active molecules into cells, both in vivo and in vitro, none has proved to be entirely satisfactory.” The solution to this problem, presented in claim 1 of the patent, is: “A method of importing a nuclear localization sequence of NF-.kappa.B into a cell in a subject, comprising administering a cyclic peptide consisting essentially of . . . to the subject, wherein said cyclic peptide is imported into a cell in the subject.”

[0689] The process described in U.S. Pat. No. 6,495,518 may be used in conjunction with one or more of the therapeutic agents described elsewhere in this disclosure. In particular, such process may be used in conjunction with the nuclear localization sequence (NLS) which directs a moiety, to which it is attached, to the nucleus of the cell. The NLS is a short peptide usually, (but not limited to) 4 to 8 amino acid residues usually, but not limited to, highly charged species such as lysine or arginine, which can be covalently bound to the therapeutic molecule or other chemical of interest.

[0690] Nuclear localization sequences are well known to those skilled in the art. Thus, by way of illustration, reference may be had to U.S. Pat. No. 6,521,456, the entire disclosure of which is hereby incorporated by reference into this specification. This patent is entitled “Cellular transport system for the transfer of a nucleic acid through the nuclear envelope and methods thereof,” it discloses a method to use NLSs to transport transgenic nucleic acid molecules to the nucleus, and it claims “a nuclear transport agent for transferring a nucleic acid from cytoplasm into a nucleus of a eukaryotic cell comprising a first module and a second module, wherein the first module is module A that binds specifically to a DNA molecule so as not to form complexes consisting of more than one DNA molecule, and wherein the second module is module B that comprises an extended nuclear localization signal having a charge thus preventing the second module from mediating nonspecific binding of the nuclear transport agent to the DNA molecule.”

[0691] By way of yet further illustration, nuclear localization signals are described in U.S. Pat. Nos. 5,576,201; 5,580,766; 5,670,347; 5,712,379; 5,736,392; 5,770,581; 5,783,420; 5,795,587; 5,891,718; 5,973,116; 5,994,512; 6,033,856; 6,057,101; 6,106,825; 6,159,691; 6,165,720; 6,203,968; 6,222,095; 6,235,521 (phage bonded to nuclear location signal); U.S. Pat. Nos. 6,235,526; 6,297,253; 6,300,120 (phage with nuclear localization signal); U.S. Pat. Nos. 6,333,127; 6,372,720; 6,379,927; 6,465,246; 6,472,176; 6,476,296; 6,479,284; 6,521,456; 6,576,758; 6,586,240; 6,649,797; 6,664,368; 6,720,310; 6,746,868; 6,759,231 (phage with nuclear localization signal); U.S. Pat. Nos. 6,770,477; 6,777,544; and the like. The entire disclosure of each of these United States patents is hereby incorporated by reference into this specification.

[0692] By way of yet further illustration, a database of nuclear localization signals is available at http://cubic.bioc.columbia.edu/db/NLSdb/ in which these experimentally derived NLSs are described by their peptide sequence in single letter amino acid code:

| | |
|---|---|
| SEQ. NO. | Amino Acid Code |

| | |
|---|---|
| SEQ. ID. NO. 316 | [de][kr]rr[kr][fyw] |
| SEQ. ID. NO. 317 | [de][rk]{2,4}[ga]r[pl][ga] |
| SEQ. ID. NO. 318 | [de][rk]{3,}?x[kr]{2,}?[pl] |
| SEQ. ID. NO. 319 | [de][st][pl]kr[stc] |
| SEQ. ID. NO. 320 | [de]k[nif]rr[dek][stmnq] |
| SEQ. ID. NO. 321 | [de]kk[pl][gl]k[gl] |
| SEQ. ID. NO. 322 | [de]kr[mqn]r[mqn]r |
| SEQ. ID. NO. 323 | [de]kxrrk[mnq] |
| SEQ. ID. NO. 324 | [de]rkrr[deplq] |
| SEQ. ID. NO. 325 | [de]rxkkkk |
| SEQ. ID. NO. 326 | [de]r{2,4}xrk[pl] |
| SEQ. ID. NO. 327 | [ed]r{4,}?[ed] |
| SEQ. ID. NO. 328 | [ga][kr]krx[kr][ga] |
| SEQ. ID. NO. 329 | [ga]kxkkk[mnq] |
| SEQ. ID. NO. 330 | [ga]rx[rk]x[rk][rk]x[qm] |
| SEQ. ID. NO. 331 | [gaplv]rkrkkr |
| SEQ. ID. NO. 332 | [kar]tpiqkhwrptvltegppvkirietgewe |
| | [ka] |
| SEQ. ID. NO. 333 | [kr][de][kr][de]xx[kr]{4,}? |
| SEQ. ID. NO. 334 | [kr][kr][kr][kr][kr][kr][kr] |
| SEQ. ID. NO. 335 | [kr][kr][qmn]r[rk][qmn]r |
| SEQ. ID. NO. 336 | [kr][kr]x[kr][kr][kr]x[kr][kr] |
| SEQ. ID. NO. 337 | [kr]g{2,}?xxg{3,}?[rk] |
| SEQ. ID. NO. 338 | [kr]krkk |
| SEQ. ID. NO. 339 | [kr]xxknkx{6,8}k[kr] |
| SEQ. ID. NO. 340 | [kr]{2,3}xxkr[kr][qlm] |
| SEQ. ID. NO. 341 | [kr]{2,}?[pl]x{1,4}[kr]{2,}?x |
| | {1,5}k{3,}? |
| SEQ. ID. NO. 342 | [kr]{2}x{0,1}[kr]{2,4}x{25,34}k |
| | {2,4}x{1,2}k |
| SEQ. ID. NO. 343 | [kr]{4}x{20,24}k{1,4}xk |
| SEQ. ID. NO. 344 | [lf][stk][viqm][kr]r[qmvi][stk]l |
| SEQ. ID. NO. 345 | [mi]vwsrd[heq]rrk |
| SEQ. ID. NO. 346 | [pl][kr]{5,7}[pl] |
| SEQ. ID. NO. 347 | [pl][pl]x[kr]r[de][kr][qst] |
| SEQ. ID. NO. 348 | [pl][rk][rk][dep]r[rk][fyw] |
| SEQ. ID. NO. 349 | [pl][rk][rk][kr][gapl][rk][stqm] |
| SEQ. ID. NO. 350 | [pl][rk]{2,3}k[pli][rk]x[pli]xk |
| SEQ. ID. NO. 351 | [pl]kxxkrr |
| SEQ. ID. NO. 352 | [pl]r[de]k[de]r |
| SEQ. ID. NO. 353 | [pl]rkrk[pl] |
| SEQ. ID. NO. 354 | [pl]xxkr[iv]k[pl][de] |
| SEQ. ID. NO. 355 | [plq][kr]x{3,4}kkrk |
| SEQ. ID. NO. 356 | [plq]k[rk]x{1,2}[rk]x{3,6}[rk][rk] |
| | x{1,2}[rk]x{1,2}[rk][rk] |
| SEQ. ID. NO. 357 | [plqmkr]r[kr][qm][kr]rxk |
| SEQ. ID. NO. 358 | [plqmnkr]k[kr][kr]rxk[plqmnkr] |
| SEQ. ID. NO. 359 | [plv]k[rk]x[qmn][rk]r |
| SEQ. ID. NO. 360 | [plv]k[rk]x[rk][rk][rk][pl] |
| SEQ. ID. NO. 361 | [plv]rk[st]r[de]k |
| SEQ. ID. NO. 362 | [pvli][rk][rk][rk][rk][rk][qmn]k |
| SEQ. ID. NO. 363 | [ql]k{2,4}x{8,12}[rk][ql][rk][ql]k |
| | r |
| SEQ. ID. NO. 364 | [ql]xkrxkxkk |
| SEQ. ID. NO. 365 | [qmn]r[rk]xkx[rk][rk] |
| SEQ. ID. NO. 366 | [rk][pliv][kr][rk]{2,4}[plvi]r |
| SEQ. ID. NO. 367 | [rk]h[rk]xxx[rk]{2,4}xr |
| SEQ. ID. NO. 368 | [rk]k{2,4}x[rk][ql][rk][pl] |
| SEQ. ID. NO. 369 | [rk]r[ms]kxk[kr] |
| SEQ. ID. NO. 370 | [rk]x[rk]x[kr]x{4,6}rkk |
| SEQ. ID. NO. 371 | [rk]{2,4}x{1,2}[rk]x{0,2}[rk]x |
| | {3,5}[rk]x{0,2}[rk][rk]{2,4} |
| | [pl] |
| SEQ. ID. NO. 372 | [rk]{2,4}x{2,4}[qlm][rk]x{2,3} |
| | [rk]kr |
| SEQ. ID. NO. 373 | [rk]{3,}?x[rk]x[rk]x{4,9}[rk]{3,}? |
| SEQ. ID. NO. 374 | [rk]{3,}?x{8,16}[rk]{4,}? |
| SEQ. ID. NO. 375 | [rk]{4,}?[qmnpl][rk]x{3,4}[rk]{2} |
| SEQ. ID. NO. 376 | [st]gx{1,3}g{3,}?x{1,2}g{3,}?[st] |
| SEQ. ID. NO. 377 | [stqm]rkrk[stqm] |
| SEQ. ID. NO. 378 | [stqm]rkrr[stqm] |
| SEQ. ID. NO. 379 | [stqm]rrrk[stqm] |
| SEQ. ID. NO. 380 | [ts][rk]kk[vli]r[pl] |
| SEQ. ID. NO. 381 | [yfw]rrrr[pl] |
| SEQ. ID. NO. 382 | apkrksgvskc |
| SEQ. ID. NO. 383 | aptkrkgs |
| SEQ. ID. NO. 384 | ckrkttnadrrka |
| SEQ. ID. NO. 385 | cygskntgakkrkidda |
| SEQ. ID. NO. 386 | d[kr]x{0,1}[ql][rk]{2,3}r |
| SEQ. ID. NO. 387 | dk[ql]kk[ql] |
| SEQ. ID. NO. 388 | dr[mn]kkkke |
| SEQ. ID. NO. 389 | eedgpqkkkrrl |
| SEQ. ID. NO. 390 | eylsrkgklel |
| SEQ. ID. NO. 391 | gggx{3}knrrx{6}rggrn |
| SEQ. ID. NO. 392 | gkkkyklkh |
| SEQ. ID. NO. 393 | gkkrska |
| SEQ. ID. NO. 394 | gr[rk]{2,4}xx[rk][ql] |
| SEQ. ID. NO. 395 | grkrkkrt |
| SEQ. ID. NO. 396 | g{2,4}[rk]x{1,3}g{3} |
| SEQ. ID. NO. 397 | hkkkkirtsptfttpktlrlrrqpkyprksaprr |
| | nkldhy |
| SEQ. ID. NO. 398 | hrieekrkrtyetfksi |
| SEQ. ID. NO. 399 | hrkyeaprhx{6}prkr |
| SEQ. ID. NO. 400 | ikyfkkfpkd |
| SEQ. ID. NO. 401 | k[ga]k[ag]kk[ag] |
| SEQ. ID. NO. 402 | k[ivqm]rr[vi][stk]l |
| SEQ. ID. NO. 403 | k[kr][kr]rr[kr] |
| SEQ. ID. NO. 404 | k[kr][qmn][rk]r[qmn]r |
| SEQ. ID. NO. 405 | k[mnq]rr[plvi]k[pl] |
| SEQ. ID. NO. 406 | k[pl]k{2,3}x{1,3}[rk]{2,4}x{6,9}k |
| | [kr] |
| SEQ. ID. NO. 407 | k[pl]k{3,}?xkk |
| SEQ. ID. NO. 408 | k[plmn]rrk[mnq] |
| SEQ. ID. NO. 409 | k[rk]{2,4}[st]h |
| SEQ. ID. NO. 410 | k[rk]{2,}?[ql]x{3,8}r{3} |
| SEQ. ID. NO. 411 | k[rk]{3,5}x{11,18}[rk]kx{2,3}k |
| SEQ. ID. NO. 412 | kakrqr |
| SEQ. ID. NO. 413 | kdcvinkhhrnrcqycrlqr |
| SEQ. ID. NO. 414 | khlkgr |
| SEQ. ID. NO. 415 | khrkhpg |
| SEQ. ID. NO. 416 | kk[mnqstc]r[mnqstc]k[mnqstc] |
| SEQ. ID. NO. 417 | kkekkkskk |

[0693] In one preferred embodiment, a small nuclear localization signal (such as RKRKK, SEQ. ID. NO. 338) is covalently attached to carbon 10 of paclitaxel molecule. In another preferred embodiment, the taxane molecule is attached to the NLS by a short linker which is composed of a ribonucleic acid/deoxyribonucleic acid hybrid linker which would be cleaved in the nucleus by Rnase H or other types of linkers sensitive to other enzymatic activity such that the taxane molecule is released from the NLS and allowed to bind to the tubulin molecules there in. Although not wanting to be bound to any particular theory, it appears that these systems exploit the fact that tubulin type beta II is found inside the nuclear membrane of cancer cells and not normal cells, thereby allowing NLS-guided tubulin binding drugs to find therapeutic target proteins only in cancer cells.

[0694] In the following compound, [chemical structure]
In the embodiment depicted above, when R₁ is OAc, the compound is paclitaxel. In one embodiment, a nuclear localization signal is linked to C10 wherein R₁ is O[NLS]. In another such embodiment, the nuclear localization signal is RKRKK (SEQ. ID. NO. 338), wherein R₁ is ORKRKK.

[0695] As described above, in yet another embodiment, there is employed a linker molecule, wherein R₁ is O[linker][NLS]. In another embodiment the linker is nucleic acid, and the NLS is selected from the list presented above. Similar functional groups may be installed at other carbon positions around the taxane ring. For example, an NLS functional group may be installed at C4, C7, C9, and/or C10. In another embodiment, a plurality of NLS functional groups are present in a single taxane molecule. Yet other variations upon this theme will be apparent to those skilled in the art.

[0696] Although preferred embodiments have been depicted and described in detail herein, it will be apparent to those skilled in the relevant art that various modifications, additions, substitutions, and the like can be made without departing from the spirit of the invention, and these are thus considered to be within the scope of the invention as defined in the claims which follow.

1. A composition of matter comprised of a substrate comprised of a taxane, a magnetic moiety, and means for covalently binding said magnetic moiety to said taxane, thus producing a magnetic taxane.

2. The composition of matter as recited in claim 1, wherein said substrate has a mitotic index factor of at least about 20 percent.

3. The composition of matter as recited in claim 2, wherein said substrate has a mitotic index factor of at least about 30 percent.

4. The composition of matter as recited in claim 3, wherein said substrate has a mitotic index factor of at least about 50 percent.

5. The composition of matter as recited in claim 2, wherein said taxane is selected from the group consisting of a paclitaxel, a docetaxel, 10-desacetyl paclitaxel, and combinations thereof.

6. The composition of matter as recited in claim 1, wherein said magnetic moiety is paramagnetic.

7. The composition of matter as recited in claim 6, wherein said magnetic moiety is comprised of a nitroxide.

8. The composition of matter as recited in claim 1, wherein said magnetic moiety is comprised of a metallic atom.

9. The composition of matter as recited in claim 8, wherein said magnetic moiety is ferromagnetic.

10. The composition of matter as recited in claim 9, wherein said metallic atom has a positive magnetic susceptibility of at least 2×10⁻⁴ cgs.

11. The composition of matter as recited in claim 10, wherein said metallic atom is iron.

12. The composition of matter as recited in claim 11, wherein said iron is iron (III).

13. The composition of matter as recited in claim 10, wherein said substrate has a positive magnetic susceptibility of at least 1×10⁻³ cgs.

14. The composition of matter as recited in claim 13, wherein said magnetic moiety is a siderophore.

15. The composition of matter as recited in claim 14, wherein said siderophore is a hydroxamic acid.

16. The composition of matter as recited in claim 15, wherein said hydroxamic acid is a ferrichrome.

17. The composition of matter as recited in claim 15, wherein said hydroxamic acid is a ferricrocin.

18. The composition of matter as recited in claim 15, wherein said hydroxamic acid is a ferrioxamine.

19. A composition of matter comprised of a substrate comprised of a taxane, a magnetic moiety, and means for covalently binding said magnetic moiety to said taxane, thus producing a magnetic taxane wherein
a. said magnetic moiety is comprised of a iron atom with a positive magnetic susceptibility of at least 2×10⁻⁴ cgs,
b. said substrate has appositive magnetic susceptibility of at least 1×10⁻³ cgs, and
c. said magnetic moiety is further comprised of a ferrichrome.

20. The composition of matter as recited in claim 19, wherein said substrate has a mitotic index factor of at least about 20 percent.

21. The composition of matter as recited in claim 20, wherein said substrate has a mitotic index factor of at least about 30 percent.

22. The composition of matter as recited in claim 21, wherein said substrate has a mitotic index factor of at least about 50 percent.

23. A composition of matter comprised of a substrate comprised of a biologically active substrate and a magnetic moiety wherein:
a. said biologically active substrate is operatively configured to bind to a binding domain of a tubulin, wherein said tubulin is part of a microtubule,
b. said binding of said biologically active substrate to said binding domain alters the tread milling behavior of said microtubule such that said microtubule is stabilized,
c. said magnetic moiety is covalently bound to said biologically active substrate.

24. The composition of matter as recited in claim 23, wherein said binding domain is a vinca domain.

25. The composition of matter as recited in claim 24, wherein said biologically active substrate is selected from the group consisting of vinblastine, vincristine, vinorelbine, vinfluine, a cryptophycin, a halichondrins, a dolastatin, a hemiasterin, and combinations thereof.

26. The composition of matter as recited in claim 23, wherein said binding domain is a colchicines domain.

27. The composition of matter as recited in claim 26, wherein said biologically active substrate is selected from the group consisting of colchicine, a combretastatin, a methoxybenzene-sulphonamide, and combinations thereof.

28. The composition of matter as recited in claim 23, wherein said binding domain is a taxane domain.

29. The composition of matter as recited in claim 28, wherein said biologically active substrate is selected from the group consisting of a taxane, paclitaxel, docetaxel, an epothilone, and combinations thereof.

The application's sequence listing, which the Patent Office published only in electronic form, follows.

SEQUENCE LISTING (418 sequences)

SEQ ID NO: 1 - protein, 3494 aa, Anemia phyllitidis
MMMMMMMMRRRRRRRRRRREEEEEEEEECCCCCCIIIIIIIISSSSSSIIIIIIIIHHHHHHHHHHIIIIIIIIGGGGQQQQQQQQQAAAAAGGGGIIIIIIIIQQQQQQQQQVVVVVVVGGGGNNNNNNNNAAAAARRRRRRRRRRRWWWWWWWWWWWWWWEEEEEEEEELLLLLLLLYYYYYYYYYYYYCCCCCCLLLLLLLLEEEEEEEEEHHHHHHHHHHGGGGIIIIIIIIQQQQQQQQQPPPPPPPDDDDDDDDGGGGQQQQQQQQQMMMMMMMMPPPPPPPSSSSSSDDDDDDDDKKKKKKKKKTTTTTTTVVVVVVVGGGGGGGGGGGGDDDDDDDDDDDDDDDDAAAAAFFFFFFFFFFFNNNNNNNNTTTTTTTFFFFFFFFFFFFFFFFFFFFFFSSSSSSEEEEEEEEETTTTTTTGGGGAAAAAGGGGKKKKKKKKKHHHHHHHHHHVVVVVVVPPPPPPPRRRRRRRRRRRAAAAAVVVVVVVFFFFFFFFFFFLLLLLLLLDDDDDDDDLLLLLLLLEEEEEEEEEPPPPPPPTTTTTTTVVVVVVVIIIIIIIIDDDDDDDDEEEEEEEEEVVVVVVVRRRRRRRRRRRTTTTTTTGGGGTTTTTTTYYYYYYYYYYYYRRRRRRRRRRRQQQQQQQQQLLLLLLLLFFFFFFFFFFFHHHHHHHHHHPPPPPPPEEEEEEEEEQQQQQQQQQLLLLLLLLIIIIIIIISSSSSSGGGGKKKKKKKKKEEEEEEEEEDDDDDDDDAAAAAAAAAANNNNNNNNNNNNNNNNFFFFFFFFFFFAAAAARRRRRRRRRRRGGGGHHHHHHHHHHYYYYYYYYYYYYTTTTTTTIIIIIIIIGGGGKKKKKKKKKEEEEEEEEEIIIIIIIIVVVVVVVDDDDDDDDLLLLLLLLCCCCCCLLLLLLLLDDDDDDDDRRRRRRRRRRRIIIIIIIIRRRRRRRRRRRKKKKKKKKKLLLLLLLLAAAAADDDDDDDDNNNNNNNNCCCCCCTTTTTTTGGGGLLLLLLLLQQQQQQQQQGGGGFFFFFFFFFFFLLLLLLLLVVVVVVVFFFFFFFFFFFHHHHHHHHHHAAAAAVVVVVVVGGGGGGGGGGGGTTTTTTTGGGGSSSSSSGGGGLLLLLLLLGGGGSSSSSSLLLLLLLLLLLLLLLLLLLLLLLLEEEEEEEEERRRRRRRRRRRLLLLLLLLSSSSSSVVVVVVVDDDDDDDDYYYYYYYYYYYYGGGGKKKKKKKKKKKKKKKKKKSSSSSSKKKKKKKKKLLLLLLLLGGGGFFFFFFFFFFFTTTTTTTVVVVVVVYYYYYYYYYYYYPPPPPPPSSSSSSPPPPPPPQQQQQQQQQVVVVVVVSSSSSSTTTTTTTSSSSSSVVVVVVVVVVVVVVEEEEEEEEEPPPPPPPYYYYYYYYYYYYNNNNNNNNSSSSSSVVVVVVVLLLLLLLLSSSSSSTTTTTTTHHHHHHHHHHSSSSSSLLLLLLLLLLLLLLLLEEEEEEEEEHHHHHHHHHHTTTTTTTDDDDDDDDVVVVVVVSSSSSSVVVVVVVLLLLLLLLLLLLLLLLDDDDDDDDNNNNNNNNEEEEEEEEEAAAAAIIIIIIIIYYYYYYYYYYYYDDDDDDDDIIIIIIIICCCCCCRRRRRRRRRRRRRRRRRRRRRRSSSSSSLLLLLLLLDDDDDDDDIIIIIIIIEEEEEEEEERRRRRRRRRRRPPPPPPPTTTTTTTYYYYYYYYYYYYTTTTTTTNNNNNNNNLLLLLLLLNNNNNNNNRRRRRRRRRRRLLLLLLLLVVVVVVVSSSSSSQQQQQQQQQVVVVVVVIIIIIIIISSSSSSSSSSSSLLLLLLLLTTTTTTTAAAAASSSSSSLLLLLLLLRRRRRRRRRRRFFFFFFFFFFFDDDDDDDDGGGGAAAAALLLLLLLLNNNNNNNNVVVVVVVDDDDDDDDVVVVVVVTTTTTTTEEEEEEEEEFFFFFFFFFFFQQQQQQQQQTTTTTTTNNNNNNNNLLLLLLLLVVVVVVVPPPPPPPYYYYYYYYYYYYPPPPPPPRRRRRRRRRRRIIIIIIIIHHHHHHHHHHFFFFFFFFFFFMMMMMMMMLLLLLLLLSSSSSSSSSSSSYYYYYYYYYYYYAAAAAPPPPPPPVVVVVVVIIIIIIIISSSSSSAAAAAEEEEEEEEEKKKKKKKKKAAAAAYYYYYYYYYYYYHHHHHHHHHHEEEEEEEEEQQQQQQQQQLLLLLLLLSSSSSSVVVVVVVAAAAAEEEEEEEEEIIIIIIIITTTTTTTNNNNNNNNSSSSSSAAAAAFFFFFFFFFFFEEEEEEEEEPPPPPPPAAAAASSSSSSMMMMMMMMMMMMMMMMAAAAAKKKKKKKKKCCCCCCDDDDDDDDPPPPPPPRRRRRRRRRRRHHHHHHHHHHGGGGKKKKKKKKKYYYYYYYYYYYYMMMMMMMMAAAAACCCCCCCCCCCCLLLLLLLLMMMMMMMMYYYYYYYYYYYYRRRRRRRRRRRGGGGDDDDDDDDVVVVVVVVVVVVVVPPPPPPPKKKKKKKKKDDDDDDDDVVVVVVVNNNNNNNNAAAAAAAAAAVVVVVVVAAAAATTTTTTTIIIIIIIIKKKKKKKKKTTTTTTTKKKKKKKKKRRRRRRRRRRRTTTTTTTIIIIIIIIQQQQQQQQQFFFFFFFFFFFVVVVVVVDDDDDDDDWWWWWWWWWWWWWWCCCCCCPPPPPPPTTTTTTTGGGGFFFFFFFFFFFKKKKKKKKKCCCCCCGGGGIIIIIIIINNNNNNNNYYYYYYYYYYYYQQQQQQQQQPPPPPPPPPPPPPPTTTTTTTVVVVVVVVVVVVVVPPPPPPPGGGGGGGGDDDDDDDDLLLLLLLLAAAAAKKKKKKKKKVVVVVVVQQQQQQQQQRRRRRRRRRRRAAAAAVVVVVVVCCCCCCMMMMMMMMIIIIIIIISSSSSSNNNNNNNNSSSSSSTTTTTTTSSSSSSVVVVVVVAAAAAEEEEEEEEEVVVVVVVFFFFFFFFFFFSSSSSSRRRRRRRRRRRIIIIIIIIDDDDDDDDHHHHHHHHHHKKKKKKKKKFFFFFFFFFFFDDDDDDDDLLLLLLLLMMMMMMMMYYYYYYYYYYYYAAAAAKKKKKKKKKRRRRRRRRRRRAAAAAFFFFFFFFFFFVVVVVVVHHHHHHHHHHWWWWWWWWWWWWWWYYYYYYYYYYYYVVVVVVVGGGGEEEEEEEEEGGGGMMMMMMMMEEEEEEEEEEEEEEEEEEGGGGEEEEEEEEEFFFFFFFFFFFSSSSSSEEEEEEEEEAAAAARRRRRRRRRRREEEEEEEEEDDDDDDDDLLLLLLLLAAAAAAAAAALLLLLLLLEEEEEEEEEKKKKKKKKKDDDDDDDDYYYYYYYYYYYYEEEEEEEEEEEEEEEEEEVVVVVVVGGGGAAAAAEEEEEEEEESSSSSSGGGGEEEEEEEEEGGGGEEEEEEEEEEEEEEEEEEGGGGDDDDDDDDEEEEEEEEEGGGGEEEEEEEEEEEEEEEEEEYYYYYYYYYYYYY

SEQ ID NO: 2 - protein, 3498 aa, Arabidopsis thaliana
MMMMMMMMRRRRRRRRRRREEEEEEEEEIIIIIIIIIIIIIIIISSSSSSIIIIIIIIHHHHHHHHHHIIIIIIIIGGGGQQQQQQQQQAAAAAGGGGIIIIIIIIQQQQQQQQQVVVVVVVGGGGNNNNNNNNSSSSSSCCCCCCWWWWWWWWWWWWWWEEEEEEEEELLLLLLLLYYYYYYYYYYYYCCCCCCLLLLLLLLEEEEEEEEEHHHHHHHHHHGGGGIIIIIIIIQQQQQQQQQPPPPPPPDDDDDDDDGGGGTTTTTTTMMMMMMMMPPPPPPPSSSSSSDDDDDDDDSSSSSSTTTTTTTVVVVVVVGGGGAAAAACCCCCCHHHHHHHHHHDDDDDDDDAAAAAFFFFFFFFFFFNNNNNNNNTTTTTTTFFFFFFFFFFFFFFFFFFFFFFSSSSSSEEEEEEEEETTTTTTTSSSSSSSSSSSSGGGGQQQQQQQQQHHHHHHHHHHVVVVVVVPPPPPPPRRRRRRRRRRRAAAAAVVVVVVVFFFFFFFFFFFLLLLLLLLDDDDDDDDLLLLLLLLEEEEEEEEEPPPPPPPTTTTTTTVVVVVVVIIIIIIIIDDDDDDDDEEEEEEEEEVVVVVVVRRRRRRRRRRRTTTTTTTGGGGTTTTTTTYYYYYYYYYYYYRRRRRRRRRRRQQQQQQQQQLLLLLLLLFFFFFFFFFFFHHHHHHHHHHPPPPPPPEEEEEEEEEQQQQQQQQQLLLLLLLLIIIIIIIISSSSSSGGGGKKKKKKKKKEEEEEEEEEDDDDDDDDAAAAAAAAAANNNNNNNNNNNNNNNNFFFFFFFFFFFAAAAARRRRRRRRRRRGGGGHHHHHHHHHHYYYYYYYYYYYYTTTTTTTVVVVVVVGGGGRRRRRRRRRRREEEEEEEEEIIIIIIIIVVVVVVVDDDDDDDDTTTTTTTCCCCCCLLLLLLLLEEEEEEEEERRRRRRRRRRRLLLLLLLLRRRRRRRRRRRKKKKKKKKKLLLLLLLLAAAAADDDDDDDDNNNNNNNNCCCCCCTTTTTTTGGGGLLLLLLLLQQQQQQQQQGGGGFFFFFFFFFFFLLLLLLLLVVVVVVVFFFFFFFFFFFNNNNNNNNAAAAAVVVVVVVGGGGGGGGGGGGTTTTTTTGGGGSSSSSSGGGGLLLLLLLLGGGGSSSSSSLLLLLLLLLLLLLLLLLLLLLLLLEEEEEEEEERRRRRRRRRRRLLLLLLLLSSSSSSVVVVVVVDDDDDDDDFFFFFFFFFFFGGGGKKKKKKKKKKKKKKKKKKSSSSSSKKKKKKKKKLLLLLLLLGGGGFFFFFFFFFFFTTTTTTTIIIIIIIIYYYYYYYYYYYYPPPPPPPSSSSSSPPPPPPPQQQQQQQQQVVVVVVVSSSSSSTTTTTTTAAAAAVVVVVVVVVVVVVVEEEEEEEEEPPPPPPPYYYYYYYYYYYYNNNNNNNNSSSSSSVVVVVVVLLLLLLLLSSSSSSTTTTTTTHHHHHHHHHHSSSSSSLLLLLLLLLLLLLLLLEEEEEEEEEHHHHHHHHHHTTTTTTTDDDDDDDDVVVVVVVVVVVVVVVVVVVVVLLLLLLLLLLLLLLLLDDDDDDDDNNNNNNNNEEEEEEEEEAAAAAIIIIIIIIYYYYYYYYYYYYDDDDDDDDIIIIIIIICCCCCCRRRRRRRRRRRRRRRRRRRRRRSSSSSSLLLLLLLLDDDDDDDDIIIIIIIIEEEEEEEEERRRRRRRRRRRPPPPPPPTTTTTTTYYYYYYYYYYYYSSSSSSNNNNNNNNLLLLLLLLNNNNNNNNRRRRRRRRRRRLLLLLLLLIIIIIIIISSSSSSQQQQQQQQQTTTTTTTIIIIIIIISSSSSSSSSSSSLLLLLLLLTTTTTTTTTTTTTTSSSSSSLLLLLLLLRRRRRRRRRRRFFFFFFFFFFFDDDDDDDDGGGGAAAAAIIIIIIIINNNNNNNNVVVVVVVDDDDDDDDIIIIIIIITTTTTTTEEEEEEEEEFFFFFFFFFFFQQQQQQQQQTTTTTTTNNNNNNNNLLLLLLLLVVVVVVVPPPPPPPYYYYYYYYYYYYPPPPPPPRRRRRRRRRRRIIIIIIIIHHHHHHHHHHFFFFFFFFFFFMMMMMMMMLLLLLLLLSSSSSSSSSSSSYYYYYYYYYYYYAAAAAPPPPPPPVVVVVVVIIIIIIIISSSSSSSSSSSSAAAAAKKKKKKKKKAAAAAYYYYYYYYYYYYHHHHHHHHHHEEEEEEEEEQQQQQQQQQFFFFFFFFFFFSSSSSSVVVVVVVPPPPPPPEEEEEEEEEIIIIIIIITTTTTTTTTTTTTTSSSSSSVVVVVVVFFFFFFFFFFFEEEEEEEEEPPPPPPPSSSSSSNNNNNNNNMMMMMMMMMMMMMMMMAAAAAKKKKKKKKKCCCCCCDDDDDDDDPPPPPPPRRRRRRRRRRRHHHHHHHHHHGGGGKKKKKKKKKYYYYYYYYYYYYMMMMMMMMAAAAACCCCCCCCCCCCLLLLLLLLMMMMMMMMYYYYYYYYYYYYRRRRRRRRRRRGGGGDDDDDDDDVVVVVVVVVVVVVVPPPPPPPKKKKKKKKKDDDDDDDDVVVVVVVNNNNNNNNTTTTTTTAAAAAVVVVVVVAAAAAAAAAAIIIIIIIIKKKKKKKKKAAAAAKKKKKKKKKRRRRRRRRRRRTTTTTTTIIIIIIIIQQQQQQQQQFFFFFFFFFFFVVVVVVVDDDDDDDDWWWWWWWWWWWWWWCCCCCCPPPPPPPTTTTTTTGGGGFFFFFFFFFFFKKKKKKKKKCCCCCCGGGGIIIIIIIINNNNNNNNYYYYYYYYYYYYQQQQQQQQQPPPPPPPPPPPPPPSSSSSSVVVVVVVVVVVVVVPPPPPPPGGGGGGGGDDDDDDDDLLLLLLLLAAAAAKKKKKKKKKVVVVVVVQQQQQQQQQRRRRRRRRRRRAAAAAVVVVVVVCCCCCCMMMMMMMMIIIIIIIISSSSSSNNNNNNNNNNNNNNNNTTTTTTTAAAAAVVVVVVVAAAAAEEEEEEEEEVVVVVVVFFFFFFFFFFFSSSSSSRRRRRRRRRRRIIIIIIIIDDDDDDDDHHHHHHHHHHKKKKKKKKKFFFFFFFFFFFDDDDDDDDLLLLLLLLMMMMMMMMYYYYYYYYYYYYSSSSSSKKKKKKKKKRRRRRRRRRRRAAAAAFFFFFFFFFFFVVVVVVVHHHHHHHHHHWWWWWWWWWWWWWWYYYYYYYYYYYYVVVVVVVGGGGEEEEEEEEEGGGGMMMMMMMMEEEEEEEEEEEEEEEEEEGGGGEEEEEEEEEFFFFFFFFFFFSSSSSSEEEEEEEEEAAAAARRRRRRRRRRREEEEEEEEEDDDDDDDDLLLLLLLLAAAAAAAAAALLLLLLLLEEEEEEEEEKKKKKKKKKDDDDDDDDYYYYYYYYYYYYEEEEEEEEEEEEEEEEEEVVVVVVVGGGGGGGGEEEEEEEEEGGGGAAAAAEEEEEEEEEDDDDDDDDDDDDDDDDDDDDDDDDEEEEEEEEEEEEEEEEEEGGGGDDDDDDDDEEEEEEEEEYYYYYYYYYYYYY

SEQ ID NO: 3 - protein, 3230 aa, Gallus gallus
EEEEEEEEETTTTTTTIIIIIIIIGGGGGGGGGGGGDDDDDDDDDDDDDDDDSSSSSSFFFFFFFFFFFNNNNNNNNTTTTTTTFFFFFFFFFFFFFFFFFFFFFFSSSSSSEEEEEEEEETTTTTTTGGGGAAAAAGGGGKKKKKKKKKHHHHHHHHHHVVVVVVVPPPPPPPRRRRRRRRRRRAAAAAVVVVVVVFFFFFFFFFFFVVVVVVVDDDDDDDDLLLLLLLLEEEEEEEEEPPPPPPPTTTTTTTVVVVVVVIIIIIIIIDDDDDDDDEEEEEEEEEVVVVVVVRRRRRRRRRRRTTTTTTTGGGGTTTTTTTYYYYYYYYYYYYRRRRRRRRRRRQQQQQQQQQLLLLLLLLFFFFFFFFFFFHHHHHHHHHHPPPPPPPEEEEEEEEEQQQQQQQQQLLLLLLLLIIIIIIIITTTTTTTGGGGKKKKKKKKKEEEEEEEEEDDDDDDDDAAAAAAAAAANNNNNNNNNNNNNNNNYYYYYYYYYYYYAAAAARRRRRRRRRRRGGGGHHHHHHHHHHYYYYYYYYYYYYTTTTTTTIIIIIIIIGGGGKKKKKKKKKEEEEEEEEEIIIIIIIIIIIIIIIIDDDDDDDDLLLLLLLLVVVVVVVLLLLLLLLDDDDDDDDRRRRRRRRRRRIIIIIIIIRRRRRRRRRRRKKKKKKKKKLLLLLLLLAAAAADDDDDDDDQQQQQQQQQCCCCCCTTTTTTTGGGGLLLLLLLLQQQQQQQQQGGGGFFFFFFFFFFFSSSSSSVVVVVVVFFFFFFFFFFFHHHHHHHHHHSSSSSSFFFFFFFFFFFGGGGGGGGGGGGTTTTTTTGGGGSSSSSSGGGGFFFFFFFFFFFTTTTTTTSSSSSSLLLLLLLLLLLLLLLLMMMMMMMMEEEEEEEEERRRRRRRRRRRLLLLLLLLSSSSSSVVVVVVVDDDDDDDDYYYYYYYYYYYYGGGGKKKKKKKKKKKKKKKKKKSSSSSSKKKKKKKKKLLLLLLLLEEEEEEEEEFFFFFFFFFFFSSSSSSIIIIIIIIYYYYYYYYYYYYPPPPPPPAAAAARRRRRRRRRRRQQQQQQQQQVVVVVVVSSSSSSTTTTTTTAAAAAVVVVVVVVVVVVVVEEEEEEEEEPPPPPPPYYYYYYYYYYYYNNNNNNNNSSSSSSIIIIIIIILLLLLLLLTTTTTTTTTTTTTTHHHHHHHHHHTTTTTTTTTTTTTTLLLLLLLLEEEEEEEEEHHHHHHHHHHSSSSSSDDDDDDDDCCCCCCAAAAAFFFFFFFFFFFMMMMMMMMVVVVVVVDDDDDDDDNNNNNNNNEEEEEEEEEAAAAAIIIIIIIIYYYYYYYYYYYYDDDDDDDDIIIIIIIICCCCCCRRRRRRRRRRRRRRRRRRRRRRNNNNNNNNLLLLLLLLDDDDDDDDIIIIIIIIEEEEEEEEERRRRRRRRRRRPPPPPPPTTTTTTTYYYYYYYYYYYYTTTTTTTNNNNNNNNLLLLLLLLNNNNNNNNRRRRRRRRRRRLLLLLLLLIIIIIIIIGGGGQQQQQQQQQIIIIIIIIVVVVVVVSSSSSSSSSSSSIIIIIIIITTTTTTTAAAAASSSSSSLLLLLLLLRRRRRRRRRRRFFFFFFFFFFFDDDDDDDDGGGGAAAAALLLLLLLLNNNNNNNNVVVVVVVDDDDDDDDLLLLLLLLTTTTTTTEEEEEEEEEFFFFFFFFFFFQQQQQQQQQTTTTTTTNNNNNNNNLLLLLLLLVVVVVVVPPPPPPPYYYYYYYYYYYYPPPPPPPRRRRRRRRRRRIIIIIIIIHHHHHHHHHHFFFFFFFFFFFPPPPPPPLLLLLLLLAAAAATTTTTTTYYYYYYYYYYYYAAAAAPPPPPPPVVVVVVVIIIIIIIISSSSSSAAAAAEEEEEEEEEKKKKKKKKKAAAAAYYYYYYYYYYYYHHHHHHHHHHEEEEEEEEEQQQQQQQQQLLLLLLLLSSSSSSVVVVVVVAAAAAEEEEEEEEEIIIIIIIITTTTTTTNNNNNNNNAAAAACCCCCCFFFFFFFFFFFEEEEEEEEEPPPPPPPAAAAANNNNNNNNQQQQQQQQQMMMMMMMMVVVVVVVKKKKKKKKKCCCCCCDDDDDDDDPPPPPPPRRRRRRRRRRRHHHHHHHHHHGGGGKKKKKKKKKYYYYYYYYYYYYMMMMMMMMAAAAACCCCCCCCCCCCLLLLLLLLLLLLLLLLYYYYYYYYYYYYRRRRRRRRRRRGGGGDDDDDDDDVVVVVVVVVVVVVVPPPPPPPKKKKKKKKKDDDDDDDDVVVVVVVNNNNNNNNAAAAAAAAAAIIIIIIIIAAAAATTTTTTTIIIIIIIIKKKKKKKKKTTTTTTTKKKKKKKKKRRRRRRRRRRRTTTTTTTIIIIIIIIQQQQQQQQQFFFFFFFFFFFVVVVVVVDDDDDDDDWWWWWWWWWWWWWWCCCCCCPPPPPPPTTTTTTTGGGGFFFFFFFFFFFKKKKKKKKKVVVVVVVGGGGIIIIIIIINNNNNNNNYYYYYYYYYYYYQQQQQQQQQPPPPPPPPPPPPPPTTTTTTTVVVVVVVVVVVVVVPPPPPPPGGGGGGGGDDDDDDDDLLLLLLLLAAAAAKKKKKKKKKVVVVVVVQQQQQQQQQRRRRRRRRRRRAAAAAVVVVVVVCCCCCCMMMMMMMMLLLLLLLLSSSSSSNNNNNNNNTTTTTTTTTTTTTTAAAAAIIIIIIIIAAAAAEEEEEEEEEAAAAAWWWWWWWWWWWWWWAAAAARRRRRRRRRRRLLLLLLLLDDDDDDDDHHHHHHHHHHKKKKKKKKKFFFFFFFFFFFDDDDDDDDLLLLLLLLMMMMMMMMYYYYYYYYYYYYAAAAAKKKKKKKKKRRRRRRRRRRRAAAAAFFFFFFFFFFFVVVVVVVHHHHHHHHHHWWWWWWWWWWWWWWYYYYYYYYYYYYVVVVVVVGGGGEEEEEEEEEGGGGMMMMMMMMEEEEEEEEEEEEEEEEEEGGGGEEEEEEEEEFFFFFFFFFFFSSSSSSEEEEEEEEEAAAAARRRRRRRRRRREEEEEEEEEDDDDDDDDMMMMMMMMAAAAAAAAAALLLLLLLLEEEEEEEEEKKKKKKKKKDDDDDDDDYYYYYYYYYYYYEEEEEEEEEEEEEEEEEEVVVVVVVGGGGVVVVVVVDDDDDDDDSSSSSSVVVVVVVEEEEEEEEEGGGGEEEEEEEEEGGGGEEEEEEEEEEEEEEEEEEEEEEEEEEEGGGGEEEEEEEEEEEEEEEEEEYYYYYYYYYYYYY

SEQ ID NO: 4 - protein, 3483 aa, Chlamydomonas reinhardtii
MMMMMMMMRRRRRRRRRRREEEEEEEEEVVVVVVVIIIIIIIISSSSSSIIIIIIIIHHHHHHHHHHIIIIIIIIGGGGQQQQQQQQQAAAAAGGGGIIIIIIIIQQQQQQQQQVVVVVVVGGGGNNNNNNNNAAAAACCCCCCWWWWWWWWWWWWWWEEEEEEEEELLLLLLLLYYYYYYYYYYYYCCCCCCLLLLLLLLEEEEEEEEEHHHHHHHHHHGGGGIIIIIIIIQQQQQQQQQPPPPPPPDDDDDDDDGGGGQQQQQQQQQMMMMMMMMPPPPPPPSSSSSSDDDDDDDDKKKKKKKKKTTTTTTTIIIIIIIIGGGGGGGGGGGGDDDDDDDDDDDDDDDDAAAAAFFFFFFFFFFFNNNNNNNNTTTTTTTFFFFFFFFFFFFFFFFFFFFFFSSSSSSEEEEEEEEETTTTTTTGGGGAAAAAGGGGKKKKKKKKKHHHHHHHHHHVVVVVVVPPPPPPPRRRRRRRRRRRCCCCCCIIIIIIIIFFFFFFFFFFFLLLLLLLLDDDDDDDDLLLLLLLLEEEEEEEEEPPPPPPPTTTTTTTVVVVVVVVVVVVVVDDDDDDDDEEEEEEEEEVVVVVVVRRRRRRRRRRRTTTTTTTGGGGTTTTTTTYYYYYYYYYYYYRRRRRRRRRRRQQQQQQQQQLLLLLLLLFFFFFFFFFFFHHHHHHHHHHPPPPPPPEEEEEEEEEQQQQQQQQQLLLLLLLLIIIIIIIISSSSSSGGGGKKKKKKKKKEEEEEEEEEDDDDDDDDAAAAAAAAAANNNNNNNNNNNNNNNNFFFFFFFFFFFAAAAARRRRRRRRRRRGGGGHHHHHHHHHHYYYYYYYYYYYYTTTTTTTIIIIIIIIGGGGKKKKKKKKKEEEEEEEEEIIIIIIIIVVVVVVVDDDDDDDDLLLLLLLLAAAAALLLLLLLLDDDDDDDDRRRRRRRRRRRIIIIIIIIRRRRRRRRRRRKKKKKKKKKLLLLLLLLAAAAADDDDDDDDNNNNNNNNCCCCCCTTTTTTTGGGGLLLLLLLLQQQQQQQQQGGGGFFFFFFFFFFFLLLLLLLLVVVVVVVFFFFFFFFFFFNNNNNNNNAAAAAVVVVVVVGGGGGGGGGGGGTTTTTTTGGGGSSSSSSGGGGLLLLLLLLGGGGSSSSSSLLLLLLLLLLLLLLLLLLLLLLLLEEEEEEEEERRRRRRRRRRRLLLLLLLLSSSSSSVVVVVVVDDDDDDDDYYYYYYYYYYYYGGGGKKKKKKKKKKKKKKKKKKSSSSSSKKKKKKKKKLLLLLLLLGGGGFFFFFFFFFFFTTTTTTTVVVVVVVYYYYYYYYYYYYPPPPPPPSSSSSSPPPPPPPQQQQQQQQQVVVVVVVSSSSSSTTTTTTTAAAAAVVVVVVVVVVVVVVEEEEEEEEEPPPPPPPYYYYYYYYYYYYNNNNNNNNSSSSSSVVVVVVVLLLLLLLLSSSSSSTTTTTTTHHHHHHHHHHSSSSSSLLLLLLLLLLLLLLLLEEEEEEEEEHHHHHHHHHHTTTTTTTDDDDDDDDVVVVVVVAAAAAVVVVVVVMMMMMMMMLLLLLLLLDDDDDDDDNNNNNNNNEEEEEEEEEAAAAAIIIIIIIIYYYYYYYYYYYYDDDDDDDDIIIIIIIICCCCCCRRRRRRRRRRRRRRRRRRRRRRSSSSSSLLLLLLLLDDDDDDDDIIIIIIIIEEEEEEEEERRRRRRRRRRRPPPPPPPTTTTTTTYYYYYYYYYYYYTTTTTTTNNNNNNNNLLLLLLLLNNNNNNNNRRRRRRRRRRRLLLLLLLLIIIIIIIIAAAAAQQQQQQQQQVVVVVVVIIIIIIIISSSSSSSSSSSSLLLLLLLLTTTTTTTAAAAASSSSSSLLLLLLLLRRRRRRRRRRRFFFFFFFFFFFDDDDDDDDGGGGAAAAALLLLLLLLNNNNNNNNVVVVVVVDDDDDDDDIIIIIIIITTTTTTTEEEEEEEEEFFFFFFFFFFFQQQQQQQQQTTTTTTTNNNNNNNNLLLLLLLLVVVVVVVPPPPPPPYYYYYYYYYYYYPPPPPPPRRRRRRRRRRRIIIIIIIIHHHHHHHHHHFFFFFFFFFFFMMMMMMMMLLLLLLLLSSSSSSSSSSSSYYYYYYYYYYYYAAAAAPPPPPPPIIIIIIIIIIIIIIIISSSSSSAAAAAEEEEEEEEEKKKKKKKKKAAAAAYYYYYYYYYYYYHHHHHHHHHHEEEEEEEEEQQQQQQQQQLLLLLLLLSSSSSSVVVVVVVAAAAAEEEEEEEEEIIIIIIIITTTTTTTNNNNNNNNAAAAAAAAAAFFFFFFFFFFFEEEEEEEEEPPPPPPPAAAAASSSSSSMMMMMMMMMMMMMMMMVVVVVVVKKKKKKKKKCCCCCCDDDDDDDDPPPPPPPRRRRRRRRRRRHHHHHHHHHHGGGGKKKKKKKKKYYYYYYYYYYYYMMMMMMMMAAAAACCCCCCCCCCCCLLLLLLLLMMMMMMMMYYYYYYYYYYYYRRRRRRRRRRRGGGGDDDDDDDDVVVVVVVVVVVVVVPPPPPPPKKKKKKKKKDDDDDDDDVVVVVVVNNNNNNNNAAAAASSSSSSVVVVVVVAAAAATTTTTTTIIIIIIIIKKKKKKKKKTTTTTTTKKKKKKKKKRRRRRRRRRRRTTTTTTTIIIIIIIIQQQQQQQQQFFFFFFFFFFFVVVVVVVDDDDDDDDWWWWWWWWWWWWWWCCCCCCPPPPPPPTTTTTTTGGGGFFFFFFFFFFFKKKKKKKKKCCCCCCGGGGIIIIIIIINNNNNNNNYYYYYYYYYYYYQQQQQQQQQPPPPPPPPPPPPPPTTTTTTTVVVVVVVVVVVVVVPPPPPPPGGGGGGGGDDDDDDDDLLLLLLLLAAAAAKKKKKKKKKVVVVVVVQQQQQQQQQRRRRRRRRRRRAAAAAVVVVVVVCCCCCCMMMMMMMMIIIIIIIISSSSSSNNNNNNNNSSSSSSTTTTTTTAAAAAIIIIIIIIGGGGEEEEEEEEEIIIIIIIIFFFFFFFFFFFSSSSSSRRRRRRRRRRRLLLLLLLLDDDDDDDDHHHHHHHHHHKKKKKKKKKFFFFFFFFFFFDDDDDDDDLLLLLLLLMMMMMMMMYYYYYYYYYYYYAAAAAKKKKKKKKKRRRRRRRRRRRAAAAAFFFFFFFFFFFVVVVVVVHHHHHHHHHHWWWWWWWWWWWWWWYYYYYYYYYYYYVVVVVVVGGGGEEEEEEEEEGGGGMMMMMMMMEEEEEEEEEEEEEEEEEEGGGGEEEEEEEEEFFFFFFFFFFFSSSSSSEEEEEEEEEAAAAARRRRRRRRRRREEEEEEEEEDDDDDDDDLLLLLLLLAAAAAAAAAALLLLLLLLEEEEEEEEEKKKKKKKKKDDDDDDDDFFFFFFFFFFFEEEEEEEEEEEEEEEEEEVVVVVVVGGGGAAAAAEEEEEEEEESSSSSSAAAAAEEEEEEEEEGGGGAAAAAGGGGEEEEEEEEEGGGGEEEEEEEEEGGGGEEEEEEEEEEEEEEEEEEYYYYYYYYYYYYY

SEQ ID NO: 5 - protein, 3507 aa, Drosophila melanogaster
MMMMMMMMRRRRRRRRRRREEEEEEEEECCCCCCIIIIIIIISSSSSSIIIIIIIIHHHHHHHHHHVVVVVVVGGGGQQQQQQQQQAAAAAGGGGVVVVVVVQQQQQQQQQIIIIIIIIGGGGNNNNNNNNAAAAACCCCCCWWWWWWWWWWWWWWEEEEEEEEELLLLLLLLYYYYYYYYYYYYCCCCCCLLLLLLLLEEEEEEEEEHHHHHHHHHHGGGGIIIIIIIIQQQQQQQQQPPPPPPPDDDDDDDDGGGGQQQQQQQQQMMMMMMMMPPPPPPPSSSSSSDDDDDDDDKKKKKKKKKTTTTTTTVVVVVVVGGGGGGGGGGGGDDDDDDDDDDDDDDDDSSSSSSFFFFFFFFFFFNNNNNNNNTTTTTTTFFFFFFFFFFFFFFFFFFFFFFSSSSSSEEEEEEEEETTTTTTTGGGGAAAAAGGGGKKKKKKKKKHHHHHHHHHHVVVVVVVPPPPPPPRRRRRRRRRRRAAAAAVVVVVVVFFFFFFFFFFFVVVVVVVDDDDDDDDLLLLLLLLEEEEEEEEEPPPPPPPTTTTTTTVVVVVVVVVVVVVVDDDDDDDDEEEEEEEEEVVVVVVVRRRRRRRRRRRTTTTTTTGGGGTTTTTTTYYYYYYYYYYYYRRRRRRRRRRRQQQQQQQQQLLLLLLLLFFFFFFFFFFFHHHHHHHHHHPPPPPPPEEEEEEEEEQQQQQQQQQLLLLLLLLIIIIIIIITTTTTTTGGGGKKKKKKKKKEEEEEEEEEDDDDDDDDAAAAAAAAAANNNNNNNNNNNNNNNNYYYYYYYYYYYYAAAAARRRRRRRRRRRGGGGHHHHHHHHHHYYYYYYYYYYYYTTTTTTTIIIIIIIIGGGGKKKKKKKKKEEEEEEEEEIIIIIIIIVVVVVVVDDDDDDDDLLLLLLLLVVVVVVVLLLLLLLLDDDDDDDDRRRRRRRRRRRIIIIIIIIRRRRRRRRRRRKKKKKKKKKLLLLLLLLAAAAADDDDDDDDQQQQQQQQQCCCCCCTTTTTTTGGGGLLLLLLLLQQQQQQQQQGGGGFFFFFFFFFFFLLLLLLLLIIIIIIIIFFFFFFFFFFFHHHHHHHHHHSSSSSSFFFFFFFFFFFGGGGGGGGGGGGTTTTTTTGGGGSSSSSSGGGGFFFFFFFFFFFTTTTTTTSSSSSSLLLLLLLLLLLLLLLLMMMMMMMMEEEEEEEEERRRRRRRRRRRLLLLLLLLSSSSSSVVVVVVVDDDDDDDDYYYYYYYYYYYYGGGGKKKKKKKKKKKKKKKKKKSSSSSSKKKKKKKKKLLLLLLLLEEEEEEEEEFFFFFFFFFFFAAAAAIIIIIIIIYYYYYYYYYYYYPPPPPPPAAAAAPPPPPPPQQQQQQQQQVVVVVVVSSSSSSTTTTTTTAAAAAVVVVVVVVVVVVVVEEEEEEEEEPPPPPPPYYYYYYYYYYYYNNNNNNNNSSSSSSIIIIIIIILLLLLLLLTTTTTTTTTTTTTTHHHHHHHHHHTTTTTTTTTTTTTTLLLLLLLLEEEEEEEEEHHHHHHHHHHSSSSSSDDDDDDDDCCCCCCAAAAAFFFFFFFFFFFMMMMMMMMVVVVVVVDDDDDDDDNNNNNNNNEEEEEEEEEAAAAAIIIIIIIIYYYYYYYYYYYYDDDDDDDDIIIIIIIICCCCCCRRRRRRRRRRRRRRRRRRRRRRNNNNNNNNLLLLLLLLDDDDDDDDIIIIIIIIEEEEEEEEERRRRRRRRRRRPPPPPPPTTTTTTTYYYYYYYYYYYYTTTTTTTNNNNNNNNLLLLLLLLNNNNNNNNRRRRRRRRRRRLLLLLLLLIIIIIIIIGGGGQQQQQQQQQIIIIIIIIVVVVVVVSSSSSSSSSSSSIIIIIIIITTTTTTTAAAAASSSSSSLLLLLLLLRRRRRRRRRRRFFFFFFFFFFFDDDDDDDDGGGGAAAAALLLLLLLLNNNNNNNNVVVVVVVDDDDDDDDLLLLLLLLTTTTTTTEEEEEEEEEFFFFFFFFFFFQQQQQQQQQTTTTTTTNNNNNNNNLLLLLLLLVVVVVVVPPPPPPPYYYYYYYYYYYYPPPPPPPRRRRRRRRRRRIIIIIIIIHHHHHHHHHHFFFFFFFFFFFPPPPPPPLLLLLLLLVVVVVVVTTTTTTTYYYYYYYYYYYYAAAAAPPPPPPPVVVVVVVIIIIIIIISSSSSSAAAAAEEEEEEEEEKKKKKKKKKAAAAAYYYYYYYYYYYYHHHHHHHHHHEEEEEEEEEQQQQQQQQQLLLLLLLLSSSSSSVVVVVVVAAAAAEEEEEEEEEIIIIIIIITTTTTTTNNNNNNNNAAAAACCCCCCFFFFFFFFFFFEEEEEEEEEPPPPPPPAAAAANNNNNNNNQQQQQQQQQMMMMMMMMVVVVVVVKKKKKKKKKCCCCCCDDDDDDDDPPPPPPPRRRRRRRRRRRHHHHHHHHHHGGGGKKKKKKKKKYYYYYYYYYYYYMMMMMMMMAAAAACCCCCCCCCCCCMMMMMMMMLLLLLLLLYYYYYYYYYYYYRRRRRRRRRRRGGGGDDDDDDDDVVVVVVVVVVVVVVPPPPPPPKKKKKKKKKDDDDDDDDVVVVVVVNNNNNNNNAAAAAAAAAAIIIIIIIIAAAAATTTTTTTIIIIIIIIKKKKKKKKKTTTTTTTKKKKKKKKKRRRRRRRRRRRTTTTTTTIIIIIIIIQQQQQQQQQFFFFFFFFFFFVVVVVVVDDDDDDDDWWWWWWWWWWWWWWCCCCCCPPPPPPPTTTTTTTGGGGFFFFFFFFFFFKKKKKKKKKVVVVVVVGGGGIIIIIIIINNNNNNNNYYYYYYYYYYYYQQQQQQQQQPPPPPPPPPPPPPPTTTTTTTVVVVVVVVVVVVVVPPPPPPPGGGGGGGGDDDDDDDDLLLLLLLLAAAAAKKKKKKKKKVVVVVVVQQQQQQQQQRRRRRRRRRRRAAAAAVVVVVVVCCCCCCMMMMMMMMLLLLLLLLSSSSSSNNNNNNNNTTTTTTTTTTTTTTAAAAAIIIIIIIIAAAAAEEEEEEEEEAAAAAWWWWWWWWWWWWWWAAAAARRRRRRRRRRRLLLLLLLLDDDDDDDDHHHHHHHHHHKKKKKKKKKFFFFFFFFFFFDDDDDDDDLLLLLLLLMMMMMMMMYYYYYYYYYYYYAAAAAKKKKKKKKKRRRRRRRRRRRAAAAAFFFFFFFFFFFVVVVVVVHHHHHHHHHHWWWWWWWWWWWWWWYYYYYYYYYYYYVVVVVVVGGGGEEEEEEEEEGGGGMMMMMMMMEEEEEEEEEEEEEEEEEEGGGGEEEEEEEEEFFFFFFFFFFFSSSSSSEEEEEEEEEAAAAARRRRRRRRRRREEEEEEEEEDDDDDDDDLLLLLLLLAAAAAAAAAALLLLLLLLEEEEEEEEEKKKKKKKKKDDDDDDDDYYYYYYYYYYYYEEEEEEEEEEEEEEEEEEVVVVVVVGGGGMMMMMMMMDDDDDDDDSSSSSSGGGGDDDDDDDDGGGGEEEEEEEEEGGGGEEEEEEEEEGGGGAAAAAEEEEEEEEEEEEEEEEEEYYYYYYYYYYYYY

SEQ ID NO: 6 - protein, 3493 aa, Eleusine indica
MMMMMMMMRRRRRRRRRRREEEEEEEEECCCCCCIIIIIIIISSSSSSIIIIIIIIHHHHHHHHHHIIIIIIIIGGGGQQQQQQQQQAAAAAGGGGIIIIIIIIQQQQQQQQQVVVVVVVGGGGNNNNNNNNAAAAACCCCCCWWWWWWWWWWWWWWEEEEEEEEELLLLLLLLYYYYYYYYYYYYCCCCCCLLLLLLLLEEEEEEEEEHHHHHHHHHHGGGGIIIIIIIIQQQQQQQQQAAAAADDDDDDDDGGGGQQQQQQQQQMMMMMMMMPPPPPPPGGGGDDDDDDDDKKKKKKKKKTTTTTTTIIIIIIIIGGGGGGGGGGGGDDDDDDDDDDDDDDDDAAAAAFFFFFFFFFFFNNNNNNNNTTTTTTTFFFFFFFFFFFFFFFFFFFFFFSSSSSSEEEEEEEEETTTTTTTGGGGAAAAAGGGGKKKKKKKKKHHHHHHHHHHVVVVVVVPPPPPPPRRRRRRRRRRRAAAAAVVVVVVVFFFFFFFFFFFVVVVVVVDDDDDDDDLLLLLLLLEEEEEEEEEPPPPPPPTTTTTTTVVVVVVVIIIIIIIIDDDDDDDDEEEEEEEEEVVVVVVVRRRRRRRRRRRTTTTTTTGGGGTTTTTTTYYYYYYYYYYYYRRRRRRRRRRRQQQQQQQQQLLLLLLLLFFFFFFFFFFFHHHHHHHHHHPPPPPPPEEEEEEEEEQQQQQQQQQLLLLLLLLIIIIIIIISSSSSSGGGGKKKKKKKKKEEEEEEEEEDDDDDDDDAAAAAAAAAANNNNNNNNNNNNNNNNFFFFFFFFFFFAAAAARRRRRRRRRRRGGGGHHHHHHHHHHYYYYYYYYYYYYTTTTTTTIIIIIIIIGGGGKKKKKKKKKEEEEEEEEEIIIIIIIIVVVVVVVDDDDDDDDLLLLLLLLCCCCCCLLLLLLLLDDDDDDDDRRRRRRRRRRRIIIIIIIIRRRRRRRRRRRKKKKKKKKKLLLLLLLLAAAAADDDDDDDDNNNNNNNNCCCCCCTTTTTTTGGGGLLLLLLLLQQQQQQQQQGGGGFFFFFFFFFFFLLLLLLLLVVVVVVVFFFFFFFFFFFNNNNNNNNAAAAAVVVVVVVGGGGGGGGGGGGTTTTTTTGGGGSSSSSSGGGGLLLLLLLLGGGGSSSSSSLLLLLLLLLLLLLLLLLLLLLLLLEEEEEEEEERRRRRRRRRRRLLLLLLLLSSSSSSVVVVVVVDDDDDDDDYYYYYYYYYYYYGGGGKKKKKKKKKKKKKKKKKKSSSSSSKKKKKKKKKLLLLLLLLGGGGFFFFFFFFFFFTTTTTTTVVVVVVVYYYYYYYYYYYYPPPPPPPSSSSSSPPPPPPPQQQQQQQQQVVVVVVVSSSSSSTTTTTTTSSSSSSVVVVVVVVVVVVVVEEEEEEEEEPPPPPPPYYYYYYYYYYYYNNNNNNNNSSSSSSVVVVVVVLLLLLLLLSSSSSSTTTTTTTHHHHHHHHHHSSSSSSLLLLLLLLLLLLLLLLEEEEEEEEEHHHHHHHHHHTTTTTTTDDDDDDDDVVVVVVVAAAAAVVVVVVVLLLLLLLLLLLLLLLLDDDDDDDDNNNNNNNNEEEEEEEEEAAAAAIIIIIIIIYYYYYYYYYYYYDDDDDDDDIIIIIIIICCCCCCRRRRRRRRRRRRRRRRRRRRRRSSSSSSLLLLLLLLDDDDDDDDIIIIIIIIEEEEEEEEERRRRRRRRRRRPPPPPPPTTTTTTTYYYYYYYYYYYYTTTTTTTNNNNNNNNLLLLLLLLNNNNNNNNRRRRRRRRRRRLLLLLLLLVVVVVVVSSSSSSQQQQQQQQQVVVVVVVIIIIIIIISSSSSSSSSSSSLLLLLLLLTTTTTTTAAAAASSSSSSLLLLLLLLRRRRRRRRRRRFFFFFFFFFFFDDDDDDDDGGGGAAAAALLLLLLLLNNNNNNNNVVVVVVVDDDDDDDDVVVVVVVNNNNNNNNEEEEEEEEEFFFFFFFFFFFQQQQQQQQQTTTTTTTNNNNNNNNLLLLLLLLVVVVVVVPPPPPPPYYYYYYYYYYYYPPPPPPPRRRRRRRRRRRIIIIIIIIHHHHHHHHHHFFFFFFFFFFFMMMMMMMMLLLLLLLLSSSSSSSSSSSSYYYYYYYYYYYYAAAAAPPPPPPPVVVVVVVIIIIIIIISSSSSSAAAAAEEEEEEEEEKKKKKKKKKAAAAAYYYYYYYYYYYYHHHHHHHHHHEEEEEEEEEQQQQQQQQQLLLLLLLLSSSSSSVVVVVVVAAAAAEEEEEEEEEIIIIIIIITTTTTTTNNNNNNNNSSSSSSAAAAAFFFFFFFFFFFEEEEEEEEEPPPPPPPSSSSSSSSSSSSMMMMMMMMMMMMMMMMAAAAAKKKKKKKKKCCCCCCDDDDDDDDPPPPPPPRRRRRRRRRRRHHHHHHHHHHGGGGKKKKKKKKKYYYYYYYYYYYYMMMMMMMMAAAAACCCCCCCCCCCCLLLLLLLLMMMMMMMMYYYYYYYYYYYYRRRRRRRRRRRGGGGDDDDDDDDVVVVVVVVVVVVVVPPPPPPPKKKKKKKKKDDDDDDDDVVVVVVVNNNNNNNNAAAAAAAAAAVVVVVVVAAAAATTTTTTTIIIIIIIIKKKKKKKKKTTTTTTTKKKKKKKKKRRRRRRRRRRRTTTTTTTIIIIIIIIQQQQQQQQQFFFFFFFFFFFVVVVVVVDDDDDDDDWWWWWWWWWWWWWWCCCCCCPPPPPPPTTTTTTTGGGGFFFFFFFFFFFKKKKKKKKKCCCCCCGGGGIIIIIIIINNNNNNNNYYYYYYYYYYYYQQQQQQQQQPPPPPPPPPPPPPPSSSSSSVVVVVVVVVVVVVVPPPPPPPGGGGGGGGDDDDDDDDLLLLLLLLAAAAAKKKKKKKKKVVVVVVVQQQQQQQQQRRRRRRRRRRRAAAAAVVVVVVVCCCCCCMMMMMMMMIIIIIIIISSSSSSNNNNNNNNSSSSSSTTTTTTTSSSSSSVVVVVVVVVVVVVVEEEEEEEEEVVVVVVVFFFFFFFFFFFSSSSSSRRRRRRRRRRRIIIIIIIIDDDDDDDDHHHHHHHHHHKKKKKKKKKFFFFFFFFFFFDDDDDDDDLLLLLLLLMMMMMMMMYYYYYYYYYYYYAAAAAKKKKKKKKKRRRRRRRRRRRAAAAAFFFFFFFFFFFVVVVVVVHHHHHHHHHHWWWWWWWWWWWWWWYYYYYYYYYYYYVVVVVVVGGGGEEEEEEEEEGGGGMMMMMMMMEEEEEEEEEEEEEEEEEEGGGGEEEEEEEEEFFFFFFFFFFFSSSSSSEEEEEEEEEAAAAARRRRRRRRRRREEEEEEEEEDDDDDDDDLLLLLLLLAAAAAAAAAALLLLLLLLEEEEEEEEEKKKKKKKKKDDDDDDDDYYYYYYYYYYYYEEEEEEEEEEEEEEEEEEVVVVVVVGGGGAAAAAEEEEEEEEEFFFFFFFFFFFDDDDDDDDEEEEEEEEEGGGGEEEEEEEEEEEEEEEEEEGGGGDDDDDDDDEEEEEEEEEGGGGDDDDDDDDEEEEEEEEEYYYYYYYYYYYYY

SEQ ID NO: 7 - protein, 3537 aa, Emericella nidulans
MMMMMMMMRRRRRRRRRRREEEEEEEEEVVVVVVVIIIIIIIISSSSSSLLLLLLLLNNNNNNNNVVVVVVVGGGGQQQQQQQQQAAAAAGGGGCCCCCCQQQQQQQQQIIIIIIIIAAAAANNNNNNNNSSSSSSCCCCCCWWWWWWWWWWWWWWEEEEEEEEELLLLLLLLYYYYYYYYYYYYCCCCCCLLLLLLLLEEEEEEEEEHHHHHHHHHHGGGGIIIIIIIIQQQQQQQQQPPPPPPPDDDDDDDDGGGGYYYYYYYYYYYYLLLLLLLLTTTTTTTEEEEEEEEEEEEEEEEEERRRRRRRRRRRKKKKKKKKKKKKKKKKKKEEEEEEEEEDDDDDDDDPPPPPPPDDDDDDDDHHHHHHHHHHGGGGFFFFFFFFFFFSSSSSSTTTTTTTFFFFFFFFFFFFFFFFFFFFFFSSSSSSEEEEEEEEETTTTTTTGGGGQQQQQQQQQGGGGKKKKKKKKKYYYYYYYYYYYYVVVVVVVPPPPPPPRRRRRRRRRRRTTTTTTTIIIIIIIIYYYYYYYYYYYYAAAAADDDDDDDDLLLLLLLLEEEEEEEEEPPPPPPPNNNNNNNNVVVVVVVVVVVVVVDDDDDDDDEEEEEEEEEVVVVVVVRRRRRRRRRRRTTTTTTTGGGGTTTTTTTYYYYYYYYYYYYRRRRRRRRRRRSSSSSSLLLLLLLLFFFFFFFFFFFHHHHHHHHHHPPPPPPPEEEEEEEEENNNNNNNNLLLLLLLLIIIIIIIITTTTTTTGGGGKKKKKKKKKEEEEEEEEEDDDDDDDDAAAAASSSSSSNNNNNNNNNNNNNNNNYYYYYYYYYYYYAAAAARRRRRRRRRRRGGGGHHHHHHHHHHYYYYYYYYYYYYTTTTTTTVVVVVVVGGGGKKKKKKKKKEEEEEEEEEMMMMMMMMIIIIIIIIDDDDDDDDQQQQQQQQQVVVVVVVLLLLLLLLDDDDDDDDKKKKKKKKKVVVVVVVRRRRRRRRRRRRRRRRRRRRRRMMMMMMMMAAAAADDDDDDDDSSSSSSCCCCCCSSSSSSGGGGLLLLLLLLQQQQQQQQQGGGGFFFFFFFFFFFLLLLLLLLVVVVVVVFFFFFFFFFFFHHHHHHHHHHSSSSSSFFFFFFFFFFFGGGGGGGGGGGGTTTTTTTGGGGSSSSSSGGGGFFFFFFFFFFFGGGGAAAAALLLLLLLLLLLLLLLLMMMMMMMMEEEEEEEEERRRRRRRRRRRLLLLLLLLSSSSSSVVVVVVVDDDDDDDDYYYYYYYYYYYYGGGGKKKKKKKKKKKKKKKKKKSSSSSSKKKKKKKKKLLLLLLLLEEEEEEEEEFFFFFFFFFFFCCCCCCVVVVVVVYYYYYYYYYYYYPPPPPPPAAAAAPPPPPPPQQQQQQQQQNNNNNNNNAAAAATTTTTTTSSSSSSVVVVVVVVVVVVVVEEEEEEEEEPPPPPPPYYYYYYYYYYYYNNNNNNNNSSSSSSIIIIIIIILLLLLLLLTTTTTTTTTTTTTTHHHHHHHHHHTTTTTTTTTTTTTTLLLLLLLLEEEEEEEEEHHHHHHHHHHSSSSSSDDDDDDDDCCCCCCSSSSSSFFFFFFFFFFFMMMMMMMMVVVVVVVDDDDDDDDNNNNNNNNEEEEEEEEEAAAAAIIIIIIIIYYYYYYYYYYYYDDDDDDDDIIIIIIIICCCCCCRRRRRRRRRRRRRRRRRRRRRRNNNNNNNNLLLLLLLLGGGGIIIIIIIIEEEEEEEEERRRRRRRRRRRPPPPPPPSSSSSSYYYYYYYYYYYYEEEEEEEEENNNNNNNNLLLLLLLLNNNNNNNNRRRRRRRRRRRLLLLLLLLIIIIIIIIAAAAAQQQQQQQQQVVVVVVVVVVVVVVSSSSSSSSSSSSIIIIIIIITTTTTTTAAAAASSSSSSLLLLLLLLRRRRRRRRRRRFFFFFFFFFFFDDDDDDDDGGGGSSSSSSLLLLLLLLNNNNNNNNVVVVVVVDDDDDDDDLLLLLLLLNNNNNNNNEEEEEEEEEFFFFFFFFFFFQQQQQQQQQTTTTTTTNNNNNNNNLLLLLLLLVVVVVVVPPPPPPPYYYYYYYYYYYYPPPPPPPRRRRRRRRRRRIIIIIIIIHHHHHHHHHHFFFFFFFFFFFPPPPPPPLLLLLLLLVVVVVVVAAAAAYYYYYYYYYYYYSSSSSSPPPPPPPVVVVVVVIIIIIIIISSSSSSAAAAADDDDDDDDKKKKKKKKKAAAAASSSSSSHHHHHHHHHHEEEEEEEEEAAAAANNNNNNNNSSSSSSVVVVVVVQQQQQQQQQDDDDDDDDIIIIIIIITTTTTTTMMMMMMMMSSSSSSCCCCCCFFFFFFFFFFFEEEEEEEEEPPPPPPPNNNNNNNNNNNNNNNNQQQQQQQQQMMMMMMMMVVVVVVVKKKKKKKKKCCCCCCDDDDDDDDPPPPPPPRRRRRRRRRRRNNNNNNNNGGGGKKKKKKKKKYYYYYYYYYYYYMMMMMMMMAAAAATTTTTTTCCCCCCLLLLLLLLLLLLLLLLYYYYYYYYYYYYRRRRRRRRRRRGGGGDDDDDDDDVVVVVVVVVVVVVVPPPPPPPRRRRRRRRRRRVVVVVVVDDDDDDDDHHHHHHHHHHAAAAAAAAAAVVVVVVVAAAAATTTTTTTLLLLLLLLKKKKKKKKKTTTTTTTKKKKKKKKKRRRRRRRRRRRTTTTTTTIIIIIIIIQQQQQQQQQFFFFFFFFFFFVVVVVVVDDDDDDDDWWWWWWWWWWWWWWCCCCCCPPPPPPPTTTTTTTGGGGFFFFFFFFFFFKKKKKKKKKIIIIIIIIGGGGIIIIIIIICCCCCCYYYYYYYYYYYYQQQQQQQQQPPPPPPPPPPPPPPQQQQQQQQQQQQQQQQQQVVVVVVVPPPPPPPNNNNNNNNGGGGDDDDDDDDLLLLLLLLAAAAAKKKKKKKKKVVVVVVVNNNNNNNNRRRRRRRRRRRAAAAAVVVVVVVCCCCCCMMMMMMMMLLLLLLLLSSSSSSNNNNNNNNTTTTTTTTTTTTTTAAAAAIIIIIIIISSSSSSEEEEEEEEEAAAAAWWWWWWWWWWWWWWSSSSSSAAAAALLLLLLLLDDDDDDDDHHHHHHHHHHKKKKKKKKKFFFFFFFFFFFDDDDDDDDLLLLLLLLMMMMMMMMYYYYYYYYYYYYSSSSSSKKKKKKKKKRRRRRRRRRRRAAAAAFFFFFFFFFFFVVVVVVVHHHHHHHHHHWWWWWWWWWWWWWWYYYYYYYYYYYYVVVVVVVGGGGEEEEEEEEEGGGGMMMMMMMMEEEEEEEEEEEEEEEEEEGGGGEEEEEEEEEFFFFFFFFFFFSSSSSSEEEEEEEEEAAAAARRRRRRRRRRREEEEEEEEEDDDDDDDDLLLLLLLLAAAAAAAAAALLLLLLLLEEEEEEEEERRRRRRRRRRRDDDDDDDDYYYYYYYYYYYYEEEEEEEEEEEEEEEEEEVVVVVVVAAAAASSSSSSDDDDDDDDSSSSSSLLLLLLLLEEEEEEEEEEEEEEEEEEEEEEEEEEEGGGGEEEEEEEEEEEEEEEEEEVVVVVVVEEEEEEEEEYYYYYYYYYYYYY

SEQ ID NO: 8 - protein, 3517 aa, Entamoeba histolytica
MMMMMMMMRRRRRRRRRRREEEEEEEEEVVVVVVVIIIIIIIITTTTTTTIIIIIIIINNNNNNNNIIIIIIIIGGGGQQQQQQQQQAAAAAGGGGCCCCCCQQQQQQQQQLLLLLLLLGGGGNNNNNNNNKKKKKKKKKCCCCCCWWWWWWWWWWWWWWEEEEEEEEELLLLLLLLFFFFFFFFFFFCCCCCCLLLLLLLLEEEEEEEEEHHHHHHHHHHGGGGIIIIIIIIQQQQQQQQQPPPPPPPDDDDDDDDGGGGTTTTTTTAAAAAIIIIIIIIAAAAANNNNNNNNSSSSSSNNNNNNNNEEEEEEEEEKKKKKKKKKRRRRRRRRRRRSSSSSSVVVVVVVIIIIIIIITTTTTTTGGGGGGGGIIIIIIIIDDDDDDDDTTTTTTTAAAAAYYYYYYYYYYYYNNNNNNNNAAAAAFFFFFFFFFFFFFFFFFFFFFFQQQQQQQQQEEEEEEEEELLLLLLLLQQQQQQQQQNNNNNNNNGGGGRRRRRRRRRRRHHHHHHHHHHVVVVVVVPPPPPPPRRRRRRRRRRRAAAAAIIIIIIIIFFFFFFFFFFFVVVVVVVDDDDDDDDTTTTTTTEEEEEEEEEPPPPPPPTTTTTTTVVVVVVVIIIIIIIIDDDDDDDDEEEEEEEEEIIIIIIIIKKKKKKKKKTTTTTTTGGGGEEEEEEEEEYYYYYYYYYYYYCCCCCCGGGGLLLLLLLLYYYYYYYYYYYYHHHHHHHHHHPPPPPPPEEEEEEEEEHHHHHHHHHHLLLLLLLLIIIIIIIICCCCCCGGGGKKKKKKKKKEEEEEEEEEDDDDDDDDAAAAASSSSSSSSSSSSNNNNNNNNFFFFFFFFFFFAAAAAKKKKKKKKKGGGGKKKKKKKKKTTTTTTTGGGGYYYYYYYYYYYYEEEEEEEEEPPPPPPPLLLLLLLLLLLLLLLLNNNNNNNNQQQQQQQQQTTTTTTTMMMMMMMMDDDDDDDDAAAAAIIIIIIIIRRRRRRRRRRRKKKKKKKKKAAAAATTTTTTTEEEEEEEEENNNNNNNNCCCCCCTTTTTTTGGGGLLLLLLLLQQQQQQQQQGGGGFFFFFFFFFFFFFFFFFFFFFFIIIIIIIIYYYYYYYYYYYYNNNNNNNNSSSSSSVVVVVVVGGGGGGGGGGGGTTTTTTTGGGGSSSSSSGGGGFFFFFFFFFFFTTTTTTTAAAAAAAAAALLLLLLLLCCCCCCEEEEEEEEEKKKKKKKKKLLLLLLLLAAAAADDDDDDDDKKKKKKKKKYYYYYYYYYYYYTTTTTTTKKKKKKKKKKKKKKKKKKTTTTTTTKKKKKKKKKLLLLLLLLNNNNNNNNTTTTTTTVVVVVVVIIIIIIIIWWWWWWWWWWWWWWPPPPPPPSSSSSSPPPPPPPKKKKKKKKKLLLLLLLLSSSSSSSSSSSSGGGGVVVVVVVVVVVVVVEEEEEEEEEPPPPPPPYYYYYYYYYYYYNNNNNNNNAAAAAVVVVVVVLLLLLLLLNNNNNNNNTTTTTTTHHHHHHHHHHAAAAAMMMMMMMMMMMMMMMMKKKKKKKKKFFFFFFFFFFFVVVVVVVNNNNNNNNCCCCCCTTTTTTTFFFFFFFFFFFMMMMMMMMVVVVVVVDDDDDDDDNNNNNNNNEEEEEEEEESSSSSSIIIIIIIIYYYYYYYYYYYYKKKKKKKKKIIIIIIIICCCCCCQQQQQQQQQKKKKKKKKKQQQQQQQQQLLLLLLLLGGGGVVVVVVVHHHHHHHHHHSSSSSSPPPPPPPSSSSSSYYYYYYYYYYYYFFFFFFFFFFFHHHHHHHHHHLLLLLLLLNNNNNNNNQQQQQQQQQLLLLLLLLIIIIIIIIAAAAAQQQQQQQQQAAAAAMMMMMMMMSSSSSSSSSSSSIIIIIIIITTTTTTTAAAAASSSSSSLLLLLLLLRRRRRRRRRRRFFFFFFFFFFFEEEEEEEEEGGGGTTTTTTTLLLLLLLLNNNNNNNNVVVVVVVDDDDDDDDLLLLLLLLNNNNNNNNEEEEEEEEEFFFFFFFFFFFPPPPPPPTTTTTTTNNNNNNNNLLLLLLLLVVVVVVVPPPPPPPFFFFFFFFFFFPPPPPPPRRRRRRRRRRRDDDDDDDDHHHHHHHHHHFFFFFFFFFFFAAAAAMMMMMMMMMMMMMMMMSSSSSSYYYYYYYYYYYYAAAAAPPPPPPPIIIIIIIIVVVVVVVTTTTTTTPPPPPPPEEEEEEEEEKKKKKKKKKAAAAAIIIIIIIIRRRRRRRRRRRQQQQQQQQQTTTTTTTLLLLLLLLSSSSSSVVVVVVVQQQQQQQQQEEEEEEEEELLLLLLLLTTTTTTTSSSSSSSSSSSSLLLLLLLLFFFFFFFFFFFDDDDDDDDPPPPPPPNNNNNNNNSSSSSSLLLLLLLLMMMMMMMMIIIIIIIIQQQQQQQQQCCCCCCDDDDDDDDDDDDDDDDIIIIIIIINNNNNNNNKKKKKKKKKGGGGKKKKKKKKKFFFFFFFFFFFMMMMMMMMSSSSSSCCCCCCCCCCCCMMMMMMMMMMMMMMMMYYYYYYYYYYYYRRRRRRRRRRRGGGGDDDDDDDDVVVVVVVSSSSSSSSSSSSRRRRRRRRRRREEEEEEEEEVVVVVVVNNNNNNNNLLLLLLLLAAAAAVVVVVVVSSSSSSGGGGIIIIIIIIKKKKKKKKKKKKKKKKKKQQQQQQQQQNNNNNNNNTTTTTTTVVVVVVVPPPPPPPFFFFFFFFFFFVVVVVVVGGGGWWWWWWWWWWWWWWCCCCCCPPPPPPPCCCCCCSSSSSSFFFFFFFFFFFKKKKKKKKKCCCCCCGGGGIIIIIIIINNNNNNNNSSSSSSQQQQQQQQQPPPPPPPAAAAATTTTTTTAAAAAVVVVVVVPPPPPPPGGGGSSSSSSSSSSSSYYYYYYYYYYYYAAAAASSSSSSTTTTTTTAAAAARRRRRRRRRRRSSSSSSAAAAACCCCCCMMMMMMMMIIIIIIIIAAAAANNNNNNNNHHHHHHHHHHTTTTTTTAAAAAMMMMMMMMCCCCCCQQQQQQQQQVVVVVVVFFFFFFFFFFFQQQQQQQQQKKKKKKKKKVVVVVVVNNNNNNNNQQQQQQQQQNNNNNNNNFFFFFFFFFFFDDDDDDDDLLLLLLLLMMMMMMMMFFFFFFFFFFFGGGGKKKKKKKKKRRRRRRRRRRRAAAAAFFFFFFFFFFFVVVVVVVHHHHHHHHHHHHHHHHHHHHYYYYYYYYYYYYVVVVVVVGGGGEEEEEEEEEGGGGMMMMMMMMEEEEEEEEEEEEEEEEEENNNNNNNNEEEEEEEEEFFFFFFFFFFFTTTTTTTDDDDDDDDAAAAARRRRRRRRRRRQQQQQQQQQDDDDDDDDLLLLLLLLYYYYYYYYYYYYEEEEEEEEELLLLLLLLEEEEEEEEEVVVVVVVDDDDDDDDYYYYYYYYYYYYAAAAANNNNNNNNLLLLLLLLAAAAALLLLLLLLDDDDDDDDNNNNNNNNTTTTTTTIIIIIIIIEEEEEEEEEGGGGEEEEEEEEESSSSSSMMMMMMMMTTTTTTTAAAAAQQQQQQQQQQ

SEQ ID NO: 9 - protein, 3520 aa, Homarus americanus
MMMMMMMMRRRRRRRRRRREEEEEEEEECCCCCCIIIIIIIISSSSSSIIIIIIIIHHHHHHHHHHVVVVVVVGGGGQQQQQQQQQAAAAAGGGGVVVVVVVQQQQQQQQQMMMMMMMMGGGGNNNNNNNNAAAAAVVVVVVVWWWWWWWWWWWWWWEEEEEEEEELLLLLLLLYYYYYYYYYYYYCCCCCCLLLLLLLLEEEEEEEEEHHHHHHHHHHGGGGIIIIIIIIQQQQQQQQQPPPPPPPDDDDDDDDAAAAAKKKKKKKKKMMMMMMMMPPPPPPPSSSSSSDDDDDDDDKKKKKKKKKTTTTTTTVVVVVVVGGGGVVVVVVVSSSSSSDDDDDDDDDDDDDDDDSSSSSSFFFFFFFFFFFNNNNNNNNTTTTTTTFFFFFFFFFFFFFFFFFFFFFFSSSSSSEEEEEEEEETTTTTTTGGGGAAAAAGGGGKKKKKKKKKHHHHHHHHHHVVVVVVVPPPPPPPRRRRRRRRRRRAAAAAVVVVVVVFFFFFFFFFFFVVVVVVVDDDDDDDDLLLLLLLLEEEEEEEEEPPPPPPPSSSSSSVVVVVVVVVVVVVVDDDDDDDDEEEEEEEEEVVVVVVVRRRRRRRRRRRSSSSSSGGGGVVVVVVVYYYYYYYYYYYYRRRRRRRRRRRQQQQQQQQQLLLLLLLLFFFFFFFFFFFHHHHHHHHHHPPPPPPPEEEEEEEEEQQQQQQQQQLLLLLLLLIIIIIIIITTTTTTTGGGGKKKKKKKKKEEEEEEEEEDDDDDDDDAAAAAAAAAANNNNNNNNNNNNNNNNYYYYYYYYYYYYAAAAARRRRRRRRRRRGGGGHHHHHHHHHHYYYYYYYYYYYYTTTTTTTIIIIIIIIGGGGKKKKKKKKKEEEEEEEEEIIIIIIIIVVVVVVVDDDDDDDDIIIIIIIIVVVVVVVLLLLLLLLDDDDDDDDRRRRRRRRRRRIIIIIIIIRRRRRRRRRRRKKKKKKKKKLLLLLLLLAAAAADDDDDDDDQQQQQQQQQCCCCCCTTTTTTTGGGGLLLLLLLLQQQQQQQQQGGGGFFFFFFFFFFFLLLLLLLLIIIIIIIIFFFFFFFFFFFHHHHHHHHHHSSSSSSFFFFFFFFFFFGGGGGGGGGGGGTTTTTTTGGGGSSSSSSGGGGFFFFFFFFFFFTTTTTTTSSSSSSLLLLLLLLLLLLLLLLMMMMMMMMEEEEEEEEERRRRRRRRRRRLLLLLLLLSSSSSSVVVVVVVDDDDDDDDYYYYYYYYYYYYGGGGKKKKKKKKKKKKKKKKKKSSSSSSKKKKKKKKKLLLLLLLLEEEEEEEEEFFFFFFFFFFFAAAAAVVVVVVVYYYYYYYYYYYYPPPPPPPAAAAAPPPPPPPQQQQQQQQQVVVVVVVAAAAATTTTTTTAAAAAVVVVVVVVVVVVVVEEEEEEEEEPPPPPPPYYYYYYYYYYYYNNNNNNNNSSSSSSIIIIIIIILLLLLLLLTTTTTTTTTTTTTTHHHHHHHHHHTTTTTTTTTTTTTTLLLLLLLLEEEEEEEEEHHHHHHHHHHSSSSSSDDDDDDDDCCCCCCAAAAAFFFFFFFFFFFMMMMMMMMVVVVVVVDDDDDDDDNNNNNNNNEEEEEEEEEAAAAAIIIIIIIIYYYYYYYYYYYYDDDDDDDDIIIIIIIICCCCCCRRRRRRRRRRRRRRRRRRRRRRNNNNNNNNLLLLLLLLDDDDDDDDIIIIIIIIEEEEEEEEERRRRRRRRRRRPPPPPPPSSSSSSYYYYYYYYYYYYTTTTTTTNNNNNNNNLLLLLLLLNNNNNNNNRRRRRRRRRRRLLLLLLLLIIIIIIIIGGGGQQQQQQQQQIIIIIIIIVVVVVVVSSSSSSSSSSSSIIIIIIIITTTTTTTAAAAASSSSSSLLLLLLLLRRRRRRRRRRRFFFFFFFFFFFDDDDDDDDGGGGAAAAALLLLLLLLNNNNNNNNVVVVVVVDDDDDDDDLLLLLLLLTTTTTTTEEEEEEEEEFFFFFFFFFFFQQQQQQQQQTTTTTTTNNNNNNNNLLLLLLLLVVVVVVVPPPPPPPYYYYYYYYYYYYPPPPPPPRRRRRRRRRRRIIIIIIIIHHHHHHHHHHFFFFFFFFFFFPPPPPPPLLLLLLLLVVVVVVVTTTTTTTYYYYYYYYYYYYAAAAAPPPPPPPVVVVVVVIIIIIIIISSSSSSAAAAAEEEEEEEEEKKKKKKKKKAAAAAYYYYYYYYYYYYHHHHHHHHHHEEEEEEEEEQQQQQQQQQLLLLLLLLSSSSSSVVVVVVVAAAAAEEEEEEEEEIIIIIIIITTTTTTTNNNNNNNNAAAAACCCCCCFFFFFFFFFFFEEEEEEEEEPPPPPPPAAAAANNNNNNNNQQQQQQQQQMMMMMMMMVVVVVVVKKKKKKKKKCCCCCCDDDDDDDDPPPPPPPRRRRRRRRRRRHHHHHHHHHHGGGGKKKKKKKKKYYYYYYYYYYYYMMMMMMMMAAAAACCCCCCCCCCCCLLLLLLLLLLLLLLLLYYYYYYYYYYYYRRRRRRRRRRRGGGGDDDDDDDDVVVVVVVVVVVVVVPPPPPPPKKKKKKKKKDDDDDDDDVVVVVVVNNNNNNNNAAAAAAAAAAIIIIIIIIAAAAANNNNNNNNIIIIIIIIKKKKKKKKKTTTTTTTKKKKKKKKKRRRRRRRRRRRTTTTTTTIIIIIIIIQQQQQQQQQFFFFFFFFFFFVVVVVVVDDDDDDDDWWWWWWWWWWWWWWCCCCCCPPPPPPPTTTTTTTGGGGFFFFFFFFFFFKKKKKKKKKVVVVVVVGGGGIIIIIIIINNNNNNNNYYYYYYYYYYYYQQQQQQQQQPPPPPPPPPPPPPPTTTTTTTVVVVVVVVVVVVVVPPPPPPPGGGGAAAAADDDDDDDDLLLLLLLLAAAAAKKKKKKKKKVVVVVVVSSSSSSRRRRRRRRRRRAAAAAVVVVVVVCCCCCCMMMMMMMMLLLLLLLLSSSSSSNNNNNNNNTTTTTTTTTTTTTTAAAAAIIIIIIIIAAAAAEEEEEEEEEAAAAAWWWWWWWWWWWWWWAAAAARRRRRRRRRRRLLLLLLLLDDDDDDDDHHHHHHHHHHKKKKKKKKKFFFFFFFFFFFDDDDDDDDLLLLLLLLMMMMMMMMYYYYYYYYYYYYAAAAAKKKKKKKKKRRRRRRRRRRRAAAAAFFFFFFFFFFFVVVVVVVHHHHHHHHHHWWWWWWWWWWWWWWYYYYYYYYYYYYVVVVVVVGGGGEEEEEEEEEGGGGMMMMMMMMEEEEEEEEEEEEEEEEEEGGGGEEEEEEEEEFFFFFFFFFFFTTTTTTTEEEEEEEEEAAAAARRRRRRRRRRREEEEEEEEEDDDDDDDDLLLLLLLLAAAAAAAAAALLLLLLLLEEEEEEEEEKKKKKKKKKDDDDDDDDYYYYYYYYYYYYEEEEEEEEEEEEEEEEEEVVVVVVVGGGGMMMMMMMMDDDDDDDDSSSSSSAAAAADDDDDDDDGGGGEEEEEEEEEDDDDDDDDIIIIIIIIEEEEEEEEEGGGGGGGGDDDDDDDDEEEEEEEEEYYYYYYYYYYYYY

SEQ ID NO: 10 - protein, 3485 aa, Hordeum vulgare
MMMMMMMMRRRRRRRRRRREEEEEEEEEIIIIIIIIIIIIIIIISSSSSSIIIIIIIIHHHHHHHHHHIIIIIIIIGGGGQQQQQQQQQAAAAAGGGGIIIIIIIIQQQQQQQQQVVVVVVVGGGGNNNNNNNNAAAAACCCCCCWWWWWWWWWWWWWWEEEEEEEEELLLLLLLLYYYYYYYYYYYYCCCCCCLLLLLLLLEEEEEEEEEHHHHHHHHHHGGGGIIIIIIIINNNNNNNNQQQQQQQQQDDDDDDDDGGGGTTTTTTTMMMMMMMMPPPPPPPSSSSSSDDDDDDDDTTTTTTTTTTTTTTVVVVVVVGGGGVVVVVVVAAAAAHHHHHHHHHHDDDDDDDDAAAAAFFFFFFFFFFFNNNNNNNNTTTTTTTFFFFFFFFFFFFFFFFFFFFFFSSSSSSEEEEEEEEETTTTTTTGGGGAAAAAGGGGKKKKKKKKKHHHHHHHHHHVVVVVVVPPPPPPPRRRRRRRRRRRAAAAAIIIIIIIIFFFFFFFFFFFVVVVVVVDDDDDDDDLLLLLLLLEEEEEEEEEPPPPPPPTTTTTTTVVVVVVVIIIIIIIIDDDDDDDDEEEEEEEEEVVVVVVVRRRRRRRRRRRTTTTTTTGGGGAAAAAYYYYYYYYYYYYRRRRRRRRRRRQQQQQQQQQLLLLLLLLFFFFFFFFFFFHHHHHHHHHHPPPPPPPEEEEEEEEEQQQQQQQQQLLLLLLLLIIIIIIIISSSSSSGGGGKKKKKKKKKEEEEEEEEEDDDDDDDDAAAAAAAAAANNNNNNNNNNNNNNNNFFFFFFFFFFFAAAAARRRRRRRRRRRGGGGHHHHHHHHHHYYYYYYYYYYYYTTTTTTTVVVVVVVGGGGKKKKKKKKKEEEEEEEEEIIIIIIIIVVVVVVVDDDDDDDDLLLLLLLLCCCCCCLLLLLLLLDDDDDDDDRRRRRRRRRRRVVVVVVVRRRRRRRRRRRKKKKKKKKKLLLLLLLLAAAAADDDDDDDDNNNNNNNNCCCCCCTTTTTTTGGGGLLLLLLLLQQQQQQQQQGGGGFFFFFFFFFFFLLLLLLLLVVVVVVVFFFFFFFFFFFNNNNNNNNAAAAAVVVVVVVGGGGGGGGGGGGTTTTTTTGGGGSSSSSSGGGGLLLLLLLLGGGGSSSSSSLLLLLLLLLLLLLLLLLLLLLLLLEEEEEEEEERRRRRRRRRRRLLLLLLLLSSSSSSVVVVVVVDDDDDDDDYYYYYYYYYYYYGGGGKKKKKKKKKKKKKKKKKKSSSSSSKKKKKKKKKLLLLLLLLGGGGFFFFFFFFFFFTTTTTTTIIIIIIIIYYYYYYYYYYYYPPPPPPPSSSSSSPPPPPPPQQQQQQQQQVVVVVVVSSSSSSTTTTTTTAAAAAVVVVVVVVVVVVVVEEEEEEEEEPPPPPPPYYYYYYYYYYYYNNNNNNNNSSSSSSVVVVVVVLLLLLLLLSSSSSSTTTTTTTHHHHHHHHHHSSSSSSLLLLLLLLLLLLLLLLEEEEEEEEEHHHHHHHHHHTTTTTTTDDDDDDDDVVVVVVVAAAAAVVVVVVVLLLLLLLLLLLLLLLLDDDDDDDDNNNNNNNNEEEEEEEEEAAAAAIIIIIIIIYYYYYYYYYYYYDDDDDDDDIIIIIIIICCCCCCRRRRRRRRRRRRRRRRRRRRRRSSSSSSLLLLLLLLDDDDDDDDIIIIIIIIEEEEEEEEERRRRRRRRRRRPPPPPPPTTTTTTTYYYYYYYYYYYYTTTTTTTNNNNNNNNLLLLLLLLNNNNNNNNRRRRRRRRRRRLLLLLLLLIIIIIIIISSSSSSQQQQQQQQQIIIIIIIIIIIIIIIISSSSSSSSSSSSLLLLLLLLTTTTTTTTTTTTTTSSSSSSLLLLLLLLRRRRRRRRRRRFFFFFFFFFFFDDDDDDDDGGGGAAAAAIIIIIIIINNNNNNNNVVVVVVVDDDDDDDDVVVVVVVTTTTTTTEEEEEEEEEFFFFFFFFFFFQQQQQQQQQTTTTTTTNNNNNNNNLLLLLLLLVVVVVVVPPPPPPPYYYYYYYYYYYYPPPPPPPRRRRRRRRRRRIIIIIIIIHHHHHHHHHHFFFFFFFFFFFMMMMMMMMLLLLLLLLSSSSSSSSSSSSYYYYYYYYYYYYAAAAAPPPPPPPVVVVVVVIIIIIIIISSSSSSAAAAAEEEEEEEEEKKKKKKKKKAAAAAYYYYYYYYYYYYHHHHHHHHHHEEEEEEEEEQQQQQQQQQLLLLLLLLSSSSSSVVVVVVVPPPPPPPEEEEEEEEEIIIIIIIITTTTTTTNNNNNNNNAAAAAVVVVVVVFFFFFFFFFFFEEEEEEEEEPPPPPPPSSSSSSSSSSSSMMMMMMMMMMMMMMMMAAAAAKKKKKKKKKCCCCCCDDDDDDDDPPPPPPPRRRRRRRRRRRHHHHHHHHHHGGGGKKKKKKKKKYYYYYYYYYYYYMMMMMMMMAAAAACCCCCCCCCCCCLLLLLLLLMMMMMMMMYYYYYYYYYYYYRRRRRRRRRRRGGGGDDDDDDDDVVVVVVVVVVVVVVPPPPPPPKKKKKKKKKDDDDDDDDVVVVVVVNNNNNNNNAAAAAAAAAAVVVVVVVAAAAATTTTTTTIIIIIIIIKKKKKKKKKTTTTTTTKKKKKKKKKRRRRRRRRRRRTTTTTTTVVVVVVVQQQQQQQQQFFFFFFFFFFFVVVVVVVDDDDDDDDWWWWWWWWWWWWWWCCCCCCPPPPPPPTTTTTTTGGGGFFFFFFFFFFFKKKKKKKKKCCCCCCGGGGIIIIIIIINNNNNNNNYYYYYYYYYYYYQQQQQQQQQPPPPPPPPPPPPPPSSSSSSVVVVVVVVVVVVVVPPPPPPPGGGGGGGGDDDDDDDDLLLLLLLLAAAAAKKKKKKKKKVVVVVVVQQQQQQQQQRRRRRRRRRRRAAAAAVVVVVVVCCCCCCMMMMMMMMIIIIIIIISSSSSSNNNNNNNNNNNNNNNNTTTTTTTAAAAAVVVVVVVAAAAAEEEEEEEEEVVVVVVVFFFFFFFFFFFSSSSSSRRRRRRRRRRRIIIIIIIIDDDDDDDDHHHHHHHHHHKKKKKKKKKFFFFFFFFFFFDDDDDDDDLLLLLLLLMMMMMMMMYYYYYYYYYYYYAAAAAKKKKKKKKKRRRRRRRRRRRAAAAAFFFFFFFFFFFVVVVVVVHHHHHHHHHHWWWWWWWWWWWWWWYYYYYYYYYYYYVVVVVVVGGGGEEEEEEEEEGGGGMMMMMMMMEEEEEEEEEEEEEEEEEEGGGGEEEEEEEEEFFFFFFFFFFFSSSSSSEEEEEEEEEAAAAARRRRRRRRRRREEEEEEEEEDDDDDDDDLLLLLLLLAAAAAAAAAALLLLLLLLEEEEEEEEEKKKKKKKKKDDDDDDDDYYYYYYYYYYYYEEEEEEEEEEEEEEEEEEVVVVVVVGGGGAAAAAEEEEEEEEEGGGGAAAAADDDDDDDDDDDDDDDDEEEEEEEEEGGGGDDDDDDDDEEEEEEEEEGGGGDDDDDDDDDDDDDDDDYYYYYYYYYYYYY

SEQ ID NO: 11 - protein, 3525 aa, Homo sapiens
MMMMMMMMRRRRRRRRRRREEEEEEEEECCCCCCIIIIIIIISSSSSSIIIIIIIIHHHHHHHHHHVVVVVVVGGGGQQQQQQQQQAAAAAGGGGVVVVVVVQQQQQQQQQIIIIIIIIGGGGNNNNNNNNAAAAACCCCCCWWWWWWWWWWWWWWEEEEEEEEELLLLLLLLYYYYYYYYYYYYCCCCCCLLLLLLLLEEEEEEEEEHHHHHHHHHHGGGGIIIIIIIIQQQQQQQQQPPPPPPPDDDDDDDDGGGGQQQQQQQQQMMMMMMMMPPPPPPPSSSSSSDDDDDDDDKKKKKKKKKTTTTTTTIIIIIIIIGGGGGGGGGGGGDDDDDDDDDDDDDDDDSSSSSSFFFFFFFFFFFNNNNNNNNTTTTTTTFFFFFFFFFFFFFFFFFFFFFFSSSSSSEEEEEEEEETTTTTTTGGGGAAAAAGGGGKKKKKKKKKHHHHHHHHHHVVVVVVVPPPPPPPRRRRRRRRRRRAAAAAVVVVVVVFFFFFFFFFFFVVVVVVVDDDDDDDDLLLLLLLLEEEEEEEEEPPPPPPPTTTTTTTVVVVVVVIIIIIIIIDDDDDDDDEEEEEEEEEVVVVVVVRRRRRRRRRRRTTTTTTTGGGGTTTTTTTYYYYYYYYYYYYRRRRRRRRRRRQQQQQQQQQLLLLLLLLFFFFFFFFFFFHHHHHHHHHHPPPPPPPEEEEEEEEEQQQQQQQQQLLLLLLLLIIIIIIIITTTTTTTGGGGKKKKKKKKKEEEEEEEEEDDDDDDDDAAAAAAAAAANNNNNNNNNNNNNNNNYYYYYYYYYYYYAAAAARRRRRRRRRRRGGGGHHHHHHHHHHYYYYYYYYYYYYTTTTTTTIIIIIIIIGGGGKKKKKKKKKEEEEEEEEEIIIIIIIIIIIIIIIIDDDDDDDDLLLLLLLLVVVVVVVLLLLLLLLDDDDDDDDRRRRRRRRRRRIIIIIIIIRRRRRRRRRRRKKKKKKKKKLLLLLLLLAAAAADDDDDDDDQQQQQQQQQCCCCCCTTTTTTTGGGGLLLLLLLLQQQQQQQQQGGGGFFFFFFFFFFFLLLLLLLLVVVVVVVFFFFFFFFFFFHHHHHHHHHHSSSSSSFFFFFFFFFFFGGGGGGGGGGGGTTTTTTTGGGGSSSSSSGGGGFFFFFFFFFFFTTTTTTTSSSSSSLLLLLLLLLLLLLLLLMMMMMMMMEEEEEEEEERRRRRRRRRRRLLLLLLLLSSSSSSVVVVVVVDDDDDDDDYYYYYYYYYYYYGGGGKKKKKKKKKKKKKKKKKKSSSSSSKKKKKKKKKLLLLLLLLEEEEEEEEEFFFFFFFFFFFSSSSSSIIIIIIIIYYYYYYYYYYYYPPPPPPPAAAAAPPPPPPPQQQQQQQQQVVVVVVVSSSSSSTTTTTTTAAAAAVVVVVVVVVVVVVVEEEEEEEEEPPPPPPPYYYYYYYYYYYYNNNNNNNNSSSSSSIIIIIIIILLLLLLLLTTTTTTTTTTTTTTHHHHHHHHHHTTTTTTTTTTTTTTLLLLLLLLEEEEEEEEEHHHHHHHHHHSSSSSSDDDDDDDDCCCCCCAAAAAFFFFFFFFFFFMMMMMMMMVVVVVVVDDDDDDDDNNNNNNNNEEEEEEEEEAAAAAIIIIIIIIYYYYYYYYYYYYDDDDDDDDIIIIIIIICCCCCCRRRRRRRRRRRRRRRRRRRRRRNNNNNNNNLLLLLLLLDDDDDDDDIIIIIIIIEEEEEEEEERRRRRRRRRRRPPPPPPPTTTTTTTYYYYYYYYYYYYTTTTTTTNNNNNNNNLLLLLLLLNNNNNNNNRRRRRRRRRRRLLLLLLLLIIIIIIIISSSSSSQQQQQQQQQIIIIIIIIVVVVVVVSSSSSSSSSSSSIIIIIIIITTTTTTTAAAAASSSSSSLLLLLLLLRRRRRRRRRRRFFFFFFFFFFFDDDDDDDDGGGGAAAAALLLLLLLLNNNNNNNNVVVVVVVDDDDDDDDLLLLLLLLTTTTTTTEEEEEEEEEFFFFFFFFFFFQQQQQQQQQTTTTTTTNNNNNNNNLLLLLLLLVVVVVVVPPPPPPPYYYYYYYYYYYYPPPPPPPRRRRRRRRRRRIIIIIIIIHHHHHHHHHHFFFFFFFFFFFPPPPPPPLLLLLLLLAAAAATTTTTTTYYYYYYYYYYYYAAAAAPPPPPPPVVVVVVVIIIIIIIISSSSSSAAAAAEEEEEEEEEKKKKKKKKKAAAAAYYYYYYYYYYYYHHHHHHHHHHEEEEEEEEEQQQQQQQQQLLLLLLLLSSSSSSVVVVVVVAAAAAEEEEEEEEEIIIIIIIITTTTTTTNNNNNNNNAAAAACCCCCCFFFFFFFFFFFEEEEEEEEEPPPPPPPAAAAANNNNNNNNQQQQQQQQQMMMMMMMMVVVVVVVKKKKKKKKKCCCCCCDDDDDDDDPPPPPPPRRRRRRRRRRRHHHHHHHHHHGGGGKKKKKKKKKYYYYYYYYYYYYMMMMMMMMAAAAACCCCCCCCCCCCLLLLLLLLLLLLLLLLYYYYYYYYYYYYRRRRRRRRRRRGGGGDDDDDDDDVVVVVVVVVVVVVVPPPPPPPKKKKKKKKKDDDDDDDDVVVVVVVNNNNNNNNAAAAAAAAAAIIIIIIIIAAAAATTTTTTTIIIIIIIIKKKKKKKKKTTTTTTTKKKKKKKKKRRRRRRRRRRRSSSSSSIIIIIIIIQQQQQQQQQFFFFFFFFFFFVVVVVVVDDDDDDDDWWWWWWWWWWWWWWCCCCCCPPPPPPPTTTTTTTGGGGFFFFFFFFFFFKKKKKKKKKVVVVVVVGGGGIIIIIIIINNNNNNNNYYYYYYYYYYYYQQQQQQQQQPPPPPPPPPPPPPPTTTTTTTVVVVVVVVVVVVVVPPPPPPPGGGGGGGGDDDDDDDDLLLLLLLLAAAAAKKKKKKKKKVVVVVVVQQQQQQQQQRRRRRRRRRRRAAAAAVVVVVVVCCCCCCMMMMMMMMLLLLLLLLSSSSSSNNNNNNNNTTTTTTTTTTTTTTAAAAAIIIIIIIIAAAAAEEEEEEEEEAAAAAWWWWWWWWWWWWWWAAAAARRRRRRRRRRRLLLLLLLLDDDDDDDDHHHHHHHHHHKKKKKKKKKFFFFFFFFFFFDDDDDDDDLLLLLLLLMMMMMMMMYYYYYYYYYYYYAAAAAKKKKKKKKKRRRRRRRRRRRAAAAAFFFFFFFFFFFVVVVVVVHHHHHHHHHHWWWWWWWWWWWWWWYYYYYYYYYYYYVVVVVVVGGGGEEEEEEEEEGGGGMMMMMMMMEEEEEEEEEEEEEEEEEEGGGGEEEEEEEEEFFFFFFFFFFFSSSSSSEEEEEEEEEAAAAARRRRRRRRRRREEEEEEEEEDDDDDDDDMMMMMMMMAAAAAAAAAALLLLLLLLEEEEEEEEEKKKKKKKKKDDDDDDDDYYYYYYYYYYYYEEEEEEEEEEEEEEEEEEVVVVVVVGGGGVVVVVVVDDDDDDDDSSSSSSVVVVVVVEEEEEEEEEGGGGEEEEEEEEEGGGGEEEEEEEEEEEEEEEEEEEEEEEEEEEGGGGEEEEEEEEEEEEEEEEEEYYYYYYYYYYYYY

SEQ ID NO: 12 - protein, 3493 aa, Zea mays
MMMMMMMMRRRRRRRRRRREEEEEEEEECCCCCCIIIIIIIISSSSSSIIIIIIIIHHHHHHHHHHIIIIIIIIGGGGQQQQQQQQQAAAAAGGGGIIIIIIIIQQQQQQQQQVVVVVVVGGGGNNNNNNNNAAAAACCCCCCWWWWWWWWWWWWWWEEEEEEEEELLLLLLLLYYYYYYYYYYYYCCCCCCLLLLLLLLEEEEEEEEEHHHHHHHHHHGGGGIIIIIIIIQQQQQQQQQAAAAADDDDDDDDGGGGQQQQQQQQQMMMMMMMMPPPPPPPGGGGDDDDDDDDKKKKKKKKKTTTTTTTIIIIIIIIGGGGGGGGGGGGDDDDDDDDDDDDDDDDAAAAAFFFFFFFFFFFNNNNNNNNTTTTTTTFFFFFFFFFFFFFFFFFFFFFFSSSSSSEEEEEEEEETTTTTTTGGGGAAAAAGGGGKKKKKKKKKHHHHHHHHHHVVVVVVVPPPPPPPRRRRRRRRRRRAAAAAVVVVVVVFFFFFFFFFFFVVVVVVVDDDDDDDDLLLLLLLLEEEEEEEEEPPPPPPPTTTTTTTVVVVVVVIIIIIIIIDDDDDDDDEEEEEEEEEVVVVVVVRRRRRRRRRRRTTTTTTTGGGGTTTTTTTYYYYYYYYYYYYRRRRRRRRRRRQQQQQQQQQLLLLLLLLFFFFFFFFFFFHHHHHHHHHHPPPPPPPEEEEEEEEEQQQQQQQQQLLLLLLLLIIIIIIIISSSSSSGGGGKKKKKKKKKEEEEEEEEEDDDDDDDDAAAAAAAAAANNNNNNNNNNNNNNNNFFFFFFFFFFFAAAAARRRRRRRRRRRGGGGHHHHHHHHHHYYYYYYYYYYYYTTTTTTTIIIIIIIIGGGGKKKKKKKKKEEEEEEEEEIIIIIIIIVVVVVVVDDDDDDDDLLLLLLLLCCCCCCLLLLLLLLDDDDDDDDRRRRRRRRRRRIIIIIIIIRRRRRRRRRRRKKKKKKKKKLLLLLLLLAAAAADDDDDDDDNNNNNNNNCCCCCCTTTTTTTGGGGLLLLLLLLQQQQQQQQQGGGGFFFFFFFFFFFLLLLLLLLVVVVVVVFFFFFFFFFFFNNNNNNNNAAAAAVVVVVVVGGGGGGGGGGGGTTTTTTTGGGGSSSSSSGGGGLLLLLLLLGGGGSSSSSSLLLLLLLLLLLLLLLLLLLLLLLLEEEEEEEEERRRRRRRRRRRLLLLLLLLSSSSSSVVVVVVVDDDDDDDDYYYYYYYYYYYYGGGGKKKKKKKKKKKKKKKKKKSSSSSSKKKKKKKKKLLLLLLLLGGGGFFFFFFFFFFFTTTTTTTVVVVVVVYYYYYYYYYYYYPPPPPPPSSSSSSPPPPPPPQQQQQQQQQVVVVVVVSSSSSSTTTTTTTSSSSSSVVVVVVVVVVVVVVEEEEEEEEEPPPPPPPYYYYYYYYYYYYNNNNNNNNSSSSSSVVVVVVVLLLLLLLLSSSSSSTTTTTTTHHHHHHHHHHSSSSSSLLLLLLLLLLLLLLLLEEEEEEEEEHHHHHHHHHHTTTTTTTDDDDDDDDVVVVVVVAAAAAIIIIIIIILLLLLLLLLLLLLLLLDDDDDDDDNNNNNNNNEEEEEEEEEAAAAAIIIIIIIIYYYYYYYYYYYYDDDDDDDDIIIIIIIICCCCCCRRRRRRRRRRRRRRRRRRRRRRSSSSSSLLLLLLLLDDDDDDDDIIIIIIIIEEEEEEEEERRRRRRRRRRRPPPPPPPTTTTTTTYYYYYYYYYYYYTTTTTTTNNNNNNNNLLLLLLLLNNNNNNNNRRRRRRRRRRRLLLLLLLLVVVVVVVSSSSSSQQQQQQQQQVVVVVVVIIIIIIIISSSSSSSSSSSSLLLLLLLLTTTTTTTAAAAASSSSSSLLLLLLLLRRRRRRRRRRRFFFFFFFFFFFDDDDDDDDGGGGAAAAALLLLLLLLNNNNNNNNVVVVVVVDDDDDDDDVVVVVVVNNNNNNNNEEEEEEEEEFFFFFFFFFFFQQQQQQQQQTTTTTTTNNNNNNNNLLLLLLLLVVVVVVVPPPPPPPYYYYYYYYYYYYPPPPPPPRRRRRRRRRRRIIIIIIIIHHHHHHHHHHFFFFFFFFFFFMMMMMMMMLLLLLLLLSSSSSSSSSSSSYYYYYYYYYYYYAAAAAPPPPPPPVVVVVVVIIIIIIIISSSSSSAAAAAEEEEEEEEEKKKKKKKKKAAAAAYYYYYYYYYYYYHHHHHHHHHHEEEEEEEEEQQQQQQQQQLLLLLLLLSSSSSSVVVVVVVAAAAAEEEEEEEEEIIIIIIIITTTTTTTNNNNNNNNSSSSSSAAAAAFFFFFFFFFFFEEEEEEEEEPPPPPPPSSSSSSSSSSSSMMMMMMMMMMMMMMMMAAAAAKKKKKKKKKCCCCCCDDDDDDDDPPPPPPPRRRRRRRRRRRHHHHHHHHHHGGGGKKKKKKKKKYYYYYYYYYYYYMMMMMMMMAAAAACCCCCCCCCCCCLLLLLLLLMMMMMMMMYYYYYYYYYYYYRRRRRRRRRRRGGGGDDDDDDDDVVVVVVVVVVVVVVPPPPPPPKKKKKKKKKDDDDDDDDVVVVVVVNNNNNNNNAAAAAAAAAAVVVVVVVAAAAATTTTTTTIIIIIIIIKKKKKKKKKTTTTTTTKKKKKKKKKRRRRRRRRRRRTTTTTTTIIIIIIIIQQQQQQQQQFFFFFFFFFFFVVVVVVVDDDDDDDDWWWWWWWWWWWWWWCCCCCCPPPPPPPTTTTTTTGGGGFFFFFFFFFFFKKKKKKKKKCCCCCCGGGGIIIIIIIINNNNNNNNYYYYYYYYYYYYQQQQQQQQQPPPPPPPPPPPPPPSSSSSSVVVVVVVVVVVVVVPPPPPPPGGGGGGGGDDDDDDDDLLLLLLLLAAAAAKKKKKKKKKVVVVVVVQQQQQQQQQRRRRRRRRRRRAAAAAVVVVVVVCCCCCCMMMMMMMMIIIIIIIISSSSSSNNNNNNNNSSSSSSTTTTTTTSSSSSSVVVVVVVVVVVVVVEEEEEEEEEVVVVVVVFFFFFFFFFFFSSSSSSRRRRRRRRRRRIIIIIIIIDDDDDDDDHHHHHHHHHHKKKKKKKKKFFFFFFFFFFFDDDDDDDDLLLLLLLLMMMMMMMMYYYYYYYYYYYYAAAAAKKKKKKKKKRRRRRRRRRRRAAAAAFFFFFFFFFFFVVVVVVVHHHHHHHHHHWWWWWWWWWWWWWWYYYYYYYYYYYYVVVVVVVGGGGEEEEEEEEEGGGGMMMMMMMMEEEEEEEEEEEEEEEEEEGGGGEEEEEEEEEFFFFFFFFFFFSSSSSSEEEEEEEEEAAAAARRRRRRRRRRREEEEEEEEEDDDDDDDDLLLLLLLLAAAAAAAAAALLLLLLLLEEEEEEEEEKKKKKKKKKDDDDDDDDYYYYYYYYYYYYEEEEEEEEEEEEEEEEEEVVVVVVVGGGGAAAAAEEEEEEEEEFFFFFFFFFFFDDDDDDDDEEEEEEEEEGGGGEEEEEEEEEDDDDDDDDGGGGDDDDDDDDEEEEEEEEEGGGGDDDDDDDDEEEEEEEEEYYYYYYYYYYYYY

SEQ ID NO: 13 - protein, 3524 aa, Mus musculus
MMMMMMMMRRRRRRRRRRREEEEEEEEECCCCCCIIIIIIIISSSSSSIIIIIIIIHHHHHHHHHHVVVVVVVGGGGQQQQQQQQQAAAAAGGGGVVVVVVVQQQQQQQQQIIIIIIIIGGGGNNNNNNNNAAAAACCCCCCWWWWWWWWWWWWWWEEEEEEEEELLLLLLLLYYYYYYYYYYYYCCCCCCLLLLLLLLEEEEEEEEEHHHHHHHHHHGGGGIIIIIIIIQQQQQQQQQPPPPPPPDDDDDDDDGGGGQQQQQQQQQMMMMMMMMPPPPPPPSSSSSSDDDDDDDDKKKKKKKKKTTTTTTTIIIIIIIIGGGGGGGGGGGGDDDDDDDDDDDDDDDDSSSSSSFFFFFFFFFFFNNNNNNNNTTTTTTTFFFFFFFFFFFFFFFFFFFFFFSSSSSSEEEEEEEEETTTTTTTGGGGAAAAAGGGGKKKKKKKKKHHHHHHHHHHVVVVVVVPPPPPPPRRRRRRRRRRRAAAAAVVVVVVVFFFFFFFFFFFVVVVVVVDDDDDDDDLLLLLLLLEEEEEEEEEPPPPPPPTTTTTTTVVVVVVVIIIIIIIIDDDDDDDDEEEEEEEEEVVVVVVVRRRRRRRRRRRTTTTTTTGGGGTTTTTTTYYYYYYYYYYYYRRRRRRRRRRRQQQQQQQQQLLLLLLLLFFFFFFFFFFFHHHHHHHHHHPPPPPPPEEEEEEEEEQQQQQQQQQLLLLLLLLIIIIIIIITTTTTTTGGGGKKKKKKKKKEEEEEEEEEDDDDDDDDAAAAAAAAAANNNNNNNNNNNNNNNNYYYYYYYYYYYYAAAAARRRRRRRRRRRGGGGHHHHHHHHHHYYYYYYYYYYYYTTTTTTTIIIIIIIIGGGGKKKKKKKKKEEEEEEEEEIIIIIIIIIIIIIIIIDDDDDDDDLLLLLLLLVVVVVVVLLLLLLLLDDDDDDDDRRRRRRRRRRRIIIIIIIIRRRRRRRRRRRKKKKKKKKKLLLLLLLLAAAAADDDDDDDDQQQQQQQQQCCCCCCTTTTTTTGGGGLLLLLLLLQQQQQQQQQGGGGFFFFFFFFFFFLLLLLLLLVVVVVVVFFFFFFFFFFFHHHHHHHHHHSSSSSSFFFFFFFFFFFGGGGGGGGGGGGTTTTTTTGGGGSSSSSSGGGGFFFFFFFFFFFTTTTTTTSSSSSSLLLLLLLLLLLLLLLLMMMMMMMMEEEEEEEEERRRRRRRRRRRLLLLLLLLSSSSSSVVVVVVVDDDDDDDDYYYYYYYYYYYYGGGGKKKKKKKKKKKKKKKKKKSSSSSSKKKKKKKKKLLLLLLLLEEEEEEEEEFFFFFFFFFFFSSSSSSIIIIIIIIYYYYYYYYYYYYPPPPPPPAAAAAPPPPPPPQQQQQQQQQVVVVVVVSSSSSSTTTTTTTAAAAAVVVVVVVVVVVVVVEEEEEEEEEPPPPPPPYYYYYYYYYYYYNNNNNNNNSSSSSSIIIIIIIILLLLLLLLTTTTTTTTTTTTTTHHHHHHHHHHTTTTTTTTTTTTTTLLLLLLLLEEEEEEEEEHHHHHHHHHHSSSSSSDDDDDDDDCCCCCCAAAAAFFFFFFFFFFFMMMMMMMMVVVVVVVDDDDDDDDNNNNNNNNEEEEEEEEEAAAAAIIIIIIIIYYYYYYYYYYYYDDDDDDDDIIIIIIIICCCCCCRRRRRRRRRRRRRRRRRRRRRRNNNNNNNNLLLLLLLLDDDDDDDDIIIIIIIIEEEEEEEEERRRRRRRRRRRPPPPPPPTTTTTTTYYYYYYYYYYYYTTTTTTTNNNNNNNNLLLLLLLLNNNNNNNNRRRRRRRRRRRLLLLLLLLIIIIIIIIGGGGQQQQQQQQQIIIIIIIIVVVVVVVSSSSSSSSSSSSIIIIIIIITTTTTTTAAAAASSSSSSLLLLLLLLRRRRRRRRRRRFFFFFFFFFFFDDDDDDDDGGGGAAAAALLLLLLLLNNNNNNNNVVVVVVVDDDDDDDDLLLLLLLLTTTTTTTEEEEEEEEEFFFFFFFFFFFQQQQQQQQQTTTTTTTNNNNNNNNLLLLLLLLVVVVVVVPPPPPPPYYYYYYYYYYYYPPPPPPPRRRRRRRRRRRIIIIIIIIHHHHHHHHHHFFFFFFFFFFFPPPPPPPLLLLLLLLAAAAATTTTTTTYYYYYYYYYYYYAAAAAPPPPPPPVVVVVVVIIIIIIIISSSSSSAAAAAEEEEEEEEEKKKKKKKKKAAAAAYYYYYYYYYYYYHHHHHHHHHHEEEEEEEEEQQQQQQQQQLLLLLLLLSSSSSSVVVVVVVAAAAAEEEEEEEEEIIIIIIIITTTTTTTNNNNNNNNAAAAACCCCCCFFFFFFFFFFFEEEEEEEEEPPPPPPPAAAAANNNNNNNNQQQQQQQQQMMMMMMMMVVVVVVVKKKKKKKKKCCCCCCDDDDDDDDPPPPPPPRRRRRRRRRRRHHHHHHHHHHGGGGKKKKKKKKKYYYYYYYYYYYYMMMMMMMMAAAAACCCCCCCCCCCCLLLLLLLLLLLLLLLLYYYYYYYYYYYYRRRRRRRRRRRGGGGDDDDDDDDVVVVVVVVVVVVVVPPPPPPPKKKKKKKKKDDDDDDDDVVVVVVVNNNNNNNNAAAAAAAAAAIIIIIIIIAAAAATTTTTTTIIIIIIIIKKKKKKKKKTTTTTTTKKKKKKKKKRRRRRRRRRRRTTTTTTTIIIIIIIIQQQQQQQQQFFFFFFFFFFFVVVVVVVDDDDDDDDWWWWWWWWWWWWWWCCCCCCPPPPPPPTTTTTTTGGGGFFFFFFFFFFFKKKKKKKKKVVVVVVVGGGGIIIIIIIINNNNNNNNYYYYYYYYYYYYQQQQQQQQQPPPPPPPPPPPPPPTTTTTTTVVVVVVVVVVVVVVPPPPPPPGGGGGGGGDDDDDDDDLLLLLLLLAAAAAKKKKKKKKKVVVVVVVQQQQQQQQQRRRRRRRRRRRAAAAAVVVVVVVCCCCCCMMMMMMMMLLLLLLLLSSSSSSNNNNNNNNTTTTTTTTTTTTTTAAAAAIIIIIIIIAAAAAEEEEEEEEEAAAAAWWWWWWWWWWWWWWAAAAARRRRRRRRRRRLLLLLLLLDDDDDDDDHHHHHHHHHHKKKKKKKKKFFFFFFFFFFFDDDDDDDDLLLLLLLLMMMMMMMMYYYYYYYYYYYYAAAAAKKKKKKKKKRRRRRRRRRRRAAAAAFFFFFFFFFFFVVVVVVVHHHHHHHHHHWWWWWWWWWWWWWWYYYYYYYYYYYYVVVVVVVGGGGEEEEEEEEEGGGGMMMMMMMMEEEEEEEEEEEEEEEEEEGGGGEEEEEEEEEFFFFFFFFFFFSSSSSSEEEEEEEEEAAAAARRRRRRRRRRREEEEEEEEEDDDDDDDDMMMMMMMMAAAAAAAAAALLLLLLLLEEEEEEEEEKKKKKKKKKDDDDDDDDYYYYYYYYYYYYEEEEEEEEEEEEEEEEEEVVVVVVVGGGGVVVVVVVDDDDDDDDSSSSSSVVVVVVVEEEEEEEEEGGGGEEEEEEEEEGGGGEEEEEEEEEEEEEEEEEEEEEEEEEEEGGGGEEEEEEEEEEEEEEEEEEYYYYYYYYYYYYY

SEQ ID NO: 14 - protein, 3533 aa, Neurospora crassa
MMMMMMMMRRRRRRRRRRRGGGGEEEEEEEEEVVVVVVVVVVVVVVHHHHHHHHHHIIIIIIIIHHHHHHHHHHLLLLLLLLGGGGQQQQQQQQQAAAAAGGGGTTTTTTTQQQQQQQQQLLLLLLLLGGGGNNNNNNNNSSSSSSAAAAAWWWWWWWWWWWWWWEEEEEEEEELLLLLLLLYYYYYYYYYYYYLLLLLLLLLLLLLLLLEEEEEEEEEHHHHHHHHHHGGGGLLLLLLLLTTTTTTTQQQQQQQQQDDDDDDDDGGGGRRRRRRRRRRRKKKKKKKKKDDDDDDDDPPPPPPPDDDDDDDDSSSSSSTTTTTTTVVVVVVVAAAAAGGGGEEEEEEEEEGGGGGGGGSSSSSSYYYYYYYYYYYYDDDDDDDDTTTTTTTFFFFFFFFFFFFFFFFFFFFFFTTTTTTTEEEEEEEEESSSSSSSSSSSSNNNNNNNNGGGGKKKKKKKKKYYYYYYYYYYYYVVVVVVVPPPPPPPRRRRRRRRRRRSSSSSSLLLLLLLLFFFFFFFFFFFVVVVVVVDDDDDDDDLLLLLLLLDDDDDDDDPPPPPPPSSSSSSPPPPPPPIIIIIIIIDDDDDDDDEEEEEEEEEIIIIIIIIRRRRRRRRRRRTTTTTTTGGGGPPPPPPPYYYYYYYYYYYYRRRRRRRRRRRQQQQQQQQQLLLLLLLLFFFFFFFFFFFHHHHHHHHHHPPPPPPPEEEEEEEEELLLLLLLLLLLLLLLLIIIIIIIISSSSSSGGGGKKKKKKKKKEEEEEEEEEDDDDDDDDAAAAAAAAAANNNNNNNNNNNNNNNNYYYYYYYYYYYYAAAAARRRRRRRRRRRGGGGHHHHHHHHHHYYYYYYYYYYYYTTTTTTTVVVVVVVGGGGKKKKKKKKKEEEEEEEEEMMMMMMMMAAAAAEEEEEEEEENNNNNNNNVVVVVVVLLLLLLLLDDDDDDDDRRRRRRRRRRRIIIIIIIIRRRRRRRRRRRKKKKKKKKKIIIIIIIITTTTTTTDDDDDDDDNNNNNNNNCCCCCCHHHHHHHHHHSSSSSSLLLLLLLLQQQQQQQQQGGGGFFFFFFFFFFFLLLLLLLLVVVVVVVFFFFFFFFFFFHHHHHHHHHHSSSSSSFFFFFFFFFFFGGGGGGGGGGGGTTTTTTTGGGGSSSSSSGGGGFFFFFFFFFFFGGGGAAAAALLLLLLLLVVVVVVVLLLLLLLLEEEEEEEEERRRRRRRRRRRLLLLLLLLAAAAAQQQQQQQQQDDDDDDDDYYYYYYYYYYYYAAAAAKKKKKKKKKKKKKKKKKKCCCCCCKKKKKKKKKLLLLLLLLEEEEEEEEEFFFFFFFFFFFSSSSSSVVVVVVVYYYYYYYYYYYYPPPPPPPAAAAAPPPPPPPRRRRRRRRRRRVVVVVVVAAAAATTTTTTTAAAAAVVVVVVVVVVVVVVEEEEEEEEEPPPPPPPYYYYYYYYYYYYNNNNNNNNAAAAAVVVVVVVLLLLLLLLAAAAATTTTTTTHHHHHHHHHHSSSSSSTTTTTTTLLLLLLLLEEEEEEEEEHHHHHHHHHHSSSSSSDDDDDDDDVVVVVVVTTTTTTTFFFFFFFFFFFLLLLLLLLVVVVVVVDDDDDDDDNNNNNNNNEEEEEEEEEAAAAAGGGGMMMMMMMMTTTTTTTCCCCCCRRRRRRRRRRRRRRRRRRRRRRNNNNNNNNLLLLLLLLDDDDDDDDIIIIIIIIPPPPPPPRRRRRRRRRRRPPPPPPPSSSSSSYYYYYYYYYYYYEEEEEEEEEHHHHHHHHHHLLLLLLLLNNNNNNNNRRRRRRRRRRRLLLLLLLLIIIIIIIIAAAAAQQQQQQQQQVVVVVVVVVVVVVVSSSSSSSSSSSSIIIIIIIITTTTTTTSSSSSSSSSSSSLLLLLLLLRRRRRRRRRRRFFFFFFFFFFFDDDDDDDDGGGGAAAAALLLLLLLLNNNNNNNNVVVVVVVDDDDDDDDLLLLLLLLNNNNNNNNEEEEEEEEEFFFFFFFFFFFQQQQQQQQQTTTTTTTNNNNNNNNLLLLLLLLVVVVVVVPPPPPPPFFFFFFFFFFFPPPPPPPRRRRRRRRRRRVVVVVVVHHHHHHHHHHYYYYYYYYYYYYPPPPPPPLLLLLLLLIIIIIIIISSSSSSYYYYYYYYYYYYAAAAAPPPPPPPVVVVVVVIIIIIIIISSSSSSAAAAATTTTTTTKKKKKKKKKSSSSSSAAAAAHHHHHHHHHHEEEEEEEEESSSSSSFFFFFFFFFFFKKKKKKKKKTTTTTTTSSSSSSEEEEEEEEELLLLLLLLTTTTTTTLLLLLLLLQQQQQQQQQCCCCCCFFFFFFFFFFFEEEEEEEEEPPPPPPPNNNNNNNNNNNNNNNNQQQQQQQQQMMMMMMMMVVVVVVVVVVVVVVCCCCCCDDDDDDDDPPPPPPPRRRRRRRRRRRNNNNNNNNGGGGKKKKKKKKKYYYYYYYYYYYYMMMMMMMMAAAAAVVVVVVVAAAAALLLLLLLLLLLLLLLLYYYYYYYYYYYYRRRRRRRRRRRGGGGDDDDDDDDVVVVVVVVVVVVVVPPPPPPPRRRRRRRRRRRDDDDDDDDTTTTTTTSSSSSSAAAAAAAAAAVVVVVVVAAAAAAAAAALLLLLLLLKKKKKKKKKAAAAAKKKKKKKKKSSSSSSSSSSSSFFFFFFFFFFFNNNNNNNNLLLLLLLLVVVVVVVEEEEEEEEEWWWWWWWWWWWWWWCCCCCCPPPPPPPTTTTTTTGGGGFFFFFFFFFFFKKKKKKKKKIIIIIIIIGGGGIIIIIIIINNNNNNNNHHHHHHHHHHQQQQQQQQQKKKKKKKKKPPPPPPPMMMMMMMMSSSSSSVVVVVVVPPPPPPPTTTTTTTAAAAASSSSSSPPPPPPPAAAAADDDDDDDDGGGGGGGGLLLLLLLLAAAAASSSSSSVVVVVVVDDDDDDDDRRRRRRRRRRRSSSSSSVVVVVVVSSSSSSMMMMMMMMLLLLLLLLSSSSSSNNNNNNNNTTTTTTTTTTTTTTAAAAAIIIIIIIIAAAAAEEEEEEEEEAAAAAWWWWWWWWWWWWWWSSSSSSRRRRRRRRRRRLLLLLLLLDDDDDDDDHHHHHHHHHHKKKKKKKKKFFFFFFFFFFFDDDDDDDDLLLLLLLLMMMMMMMMYYYYYYYYYYYYSSSSSSKKKKKKKKKRRRRRRRRRRRAAAAAFFFFFFFFFFFVVVVVVVHHHHHHHHHHWWWWWWWWWWWWWWYYYYYYYYYYYYVVVVVVVGGGGEEEEEEEEEGGGGMMMMMMMMEEEEEEEEEEEEEEEEEEGGGGEEEEEEEEEFFFFFFFFFFFSSSSSSEEEEEEEEEAAAAARRRRRRRRRRREEEEEEEEEDDDDDDDDLLLLLLLLRRRRRRRRRRRSSSSSSLLLLLLLLEEEEEEEEEKKKKKKKKKDDDDDDDDYYYYYYYYYYYYEEEEEEEEEEEEEEEEEEVVVVVVVAAAAAGGGGDDDDDDDDYYYYYYYYYYYYNNNNNNNNDDDDDDDDVVVVVVVDDDDDDDDVVVVVVVDDDDDDDDAAAAAEEEEEEEEEYYYYYYYYYYYYY

SEQ ID NO: 15 - protein, 3489 aa, Oryza sativa
MMMMMMMMRRRRRRRRRRREEEEEEEEEIIIIIIIIIIIIIIIISSSSSSIIIIIIIIHHHHHHHHHHIIIIIIIIGGGGQQQQQQQQQAAAAAGGGGIIIIIIIIQQQQQQQQQVVVVVVVGGGGNNNNNNNNAAAAACCCCCCWWWWWWWWWWWWWWEEEEEEEEELLLLLLLLYYYYYYYYYYYYCCCCCCLLLLLLLLEEEEEEEEEHHHHHHHHHHGGGGIIIIIIIIEEEEEEEEEPPPPPPPDDDDDDDDGGGGTTTTTTTMMMMMMMMPPPPPPPSSSSSSDDDDDDDDTTTTTTTTTTTTTTVVVVVVVGGGGVVVVVVVAAAAAHHHHHHHHHHDDDDDDDDAAAAAFFFFFFFFFFFNNNNNNNNTTTTTTTFFFFFFFFFFFFFFFFFFFFFFSSSSSSEEEEEEEEETTTTTTTGGGGAAAAAGGGGKKKKKKKKKHHHHHHHHHHVVVVVVVPPPPPPPRRRRRRRRRRRAAAAAIIIIIIIIFFFFFFFFFFFVVVVVVVDDDDDDDDLLLLLLLLEEEEEEEEEPPPPPPPTTTTTTTVVVVVVVIIIIIIIIDDDDDDDDEEEEEEEEEVVVVVVVRRRRRRRRRRRTTTTTTTGGGGSSSSSSYYYYYYYYYYYYRRRRRRRRRRRQQQQQQQQQLLLLLLLLFFFFFFFFFFFHHHHHHHHHHPPPPPPPEEEEEEEEEQQQQQQQQQLLLLLLLLIIIIIIIISSSSSSGGGGKKKKKKKKKEEEEEEEEEDDDDDDDDAAAAAAAAAANNNNNNNNNNNNNNNNFFFFFFFFFFFAAAAARRRRRRRRRRRGGGGHHHHHHHHHHYYYYYYYYYYYYTTTTTTTVVVVVVVGGGGKKKKKKKKKEEEEEEEEEIIIIIIIIVVVVVVVDDDDDDDDLLLLLLLLCCCCCCLLLLLLLLDDDDDDDDRRRRRRRRRRRVVVVVVVRRRRRRRRRRRKKKKKKKKKLLLLLLLLAAAAADDDDDDDDNNNNNNNNCCCCCCTTTTTTTGGGGLLLLLLLLQQQQQQQQQGGGGFFFFFFFFFFFLLLLLLLLVVVVVVVFFFFFFFFFFFNNNNNNNNAAAAAVVVVVVVGGGGGGGGGGGGTTTTTTTGGGGSSSSSSGGGGLLLLLLLLGGGGSSSSSSLLLLLLLLLLLLLLLLLLLLLLLLEEEEEEEEERRRRRRRRRRRLLLLLLLLSSSSSSVVVVVVVDDDDDDDDYYYYYYYYYYYYGGGGKKKKKKKKKKKKKKKKKKSSSSSSKKKKKKKKKLLLLLLLLGGGGFFFFFFFFFFFTTTTTTTIIIIIIIIYYYYYYYYYYYYPPPPPPPSSSSSSPPPPPPPQQQQQQQQQVVVVVVVSSSSSSTTTTTTTAAAAAVVVVVVVVVVVVVVEEEEEEEEEPPPPPPPYYYYYYYYYYYYNNNNNNNNSSSSSSVVVVVVVLLLLLLLLSSSSSSTTTTTTTHHHHHHHHHHSSSSSSLLLLLLLLLLLLLLLLEEEEEEEEEHHHHHHHHHHTTTTTTTDDDDDDDDVVVVVVVAAAAAVVVVVVVLLLLLLLLLLLLLLLLDDDDDDDDNNNNNNNNEEEEEEEEEAAAAAIIIIIIIIYYYYYYYYYYYYDDDDDDDDIIIIIIIICCCCCCRRRRRRRRRRRRRRRRRRRRRRSSSSSSLLLLLLLLDDDDDDDDIIIIIIIIEEEEEEEEERRRRRRRRRRRPPPPPPPTTTTTTTYYYYYYYYYYYYTTTTTTTNNNNNNNNLLLLLLLLNNNNNNNNRRRRRRRRRRRLLLLLLLLIIIIIIIISSSSSSQQQQQQQQQIIIIIIIIIIIIIIIISSSSSSSSSSSSLLLLLLLLTTTTTTTTTTTTTTSSSSSSLLLLLLLLRRRRRRRRRRRFFFFFFFFFFFDDDDDDDDGGGGAAAAAIIIIIIIINNNNNNNNVVVVVVVDDDDDDDDVVVVVVVTTTTTTTEEEEEEEEEFFFFFFFFFFFQQQQQQQQQTTTTTTTNNNNNNNNLLLLLLLLVVVVVVVPPPPPPPYYYYYYYYYYYYPPPPPPPRRRRRRRRRRRIIIIIIIIHHHHHHHHHHFFFFFFFFFFFMMMMMMMMLLLLLLLLSSSSSSSSSSSSYYYYYYYYYYYYAAAAAPPPPPPPVVVVVVVIIIIIIIISSSSSSAAAAAEEEEEEEEEKKKKKKKKKAAAAAYYYYYYYYYYYYHHHHHHHHHHEEEEEEEEEQQQQQQQQQLLLLLLLLSSSSSSVVVVVVVPPPPPPPEEEEEEEEEIIIIIIIITTTTTTTNNNNNNNNAAAAAVVVVVVVFFFFFFFFFFFEEEEEEEEEPPPPPPPSSSSSSSSSSSSMMMMMMMMMMMMMMMMAAAAAKKKKKKKKKCCCCCCDDDDDDDDPPPPPPPRRRRRRRRRRRHHHHHHHHHHGGGGKKKKKKKKKYYYYYYYYYYYYMMMMMMMMAAAAACCCCCCCCCCCCLLLLLLLLMMMMMMMMYYYYYYYYYYYYRRRRRRRRRRRGGGGDDDDDDDDVVVVVVVVVVVVVVPPPPPPPKKKKKKKKKDDDDDDDDVVVVVVVNNNNNNNNAAAAAAAAAAVVVVVVVAAAAATTTTTTTIIIIIIIIKKKKKKKKKTTTTTTTKKKKKKKKKRRRRRRRRRRRTTTTTTTVVVVVVVQQQQQQQQQFFFFFFFFFFFVVVVVVVDDDDDDDDWWWWWWWWWWWWWWCCCCCCPPPPPPPTTTTTTTGGGGFFFFFFFFFFFKKKKKKKKKCCCCCCGGGGIIIIIIIINNNNNNNNYYYYYYYYYYYYQQQQQQQQQPPPPPPPPPPPPPPSSSSSSVVVVVVVVVVVVVVPPPPPPPGGGGGGGGDDDDDDDDLLLLLLLLAAAAAKKKKKKKKKVVVVVVVQQQQQQQQQRRRRRRRRRRRAAAAAVVVVVVVCCCCCCMMMMMMMMIIIIIIIISSSSSSNNNNNNNNNNNNNNNNTTTTTTTAAAAAVVVVVVVAAAAAEEEEEEEEEVVVVVVVFFFFFFFFFFFSSSSSSRRRRRRRRRRRIIIIIIIIDDDDDDDDHHHHHHHHHHKKKKKKKKKFFFFFFFFFFFDDDDDDDDLLLLLLLLMMMMMMMMYYYYYYYYYYYYAAAAAKKKKKKKKKRRRRRRRRRRRAAAAAFFFFFFFFFFFVVVVVVVHHHHHHHHHHWWWWWWWWWWWWWWYYYYYYYYYYYYVVVVVVVGGGGEEEEEEEEEGGGGMMMMMMMMEEEEEEEEEEEEEEEEEEGGGGEEEEEEEEEFFFFFFFFFFFSSSSSSEEEEEEEEEAAAAARRRRRRRRRRREEEEEEEEEDDDDDDDDLLLLLLLLAAAAAAAAAALLLLLLLLEEEEEEEEEKKKKKKKKKDDDDDDDDYYYYYYYYYYYYEEEEEEEEEEEEEEEEEEVVVVVVVGGGGAAAAAEEEEEEEEEGGGGAAAAADDDDDDDDDDDDDDDDEEEEEEEEENNNNNNNNDDDDDDDDDDDDDDDDGGGGEEEEEEEEEDDDDDDDDYYYYYYYYYYYYY

SEQ ID NO: 16 - protein, 3529 aa, Paracentrotus lividus
MMMMMMMMRRRRRRRRRRREEEEEEEEECCCCCCIIIIIIIISSSSSSIIIIIIIIHHHHHHHHHHVVVVVVVGGGGQQQQQQQQQAAAAAGGGGVVVVVVVQQQQQQQQQMMMMMMMMGGGGNNNNNNNNAAAAACCCCCCWWWWWWWWWWWWWWEEEEEEEEELLLLLLLLYYYYYYYYYYYYCCCCCCLLLLLLLLEEEEEEEEEHHHHHHHHHHGGGGIIIIIIIIQQQQQQQQQPPPPPPPDDDDDDDDGGGGQQQQQQQQQMMMMMMMMPPPPPPPSSSSSSDDDDDDDDKKKKKKKKKTTTTTTTIIIIIIIIGGGGGGGGGGGGDDDDDDDDDDDDDDDDSSSSSSFFFFFFFFFFFNNNNNNNNTTTTTTTFFFFFFFFFFFFFFFFFFFFFFSSSSSSEEEEEEEEETTTTTTTGGGGAAAAAGGGGKKKKKKKKKHHHHHHHHHHVVVVVVVPPPPPPPRRRRRRRRRRRAAAAAVVVVVVVFFFFFFFFFFFVVVVVVVDDDDDDDDLLLLLLLLEEEEEEEEEPPPPPPPTTTTTTTVVVVVVVVVVVVVVDDDDDDDDEEEEEEEEEVVVVVVVRRRRRRRRRRRTTTTTTTGGGGTTTTTTTYYYYYYYYYYYYRRRRRRRRRRRQQQQQQQQQLLLLLLLLFFFFFFFFFFFHHHHHHHHHHPPPPPPPEEEEEEEEEQQQQQQQQQLLLLLLLLIIIIIIIITTTTTTTGGGGKKKKKKKKKEEEEEEEEEDDDDDDDDAAAAAAAAAANNNNNNNNNNNNNNNNYYYYYYYYYYYYAAAAARRRRRRRRRRRGGGGHHHHHHHHHHYYYYYYYYYYYYTTTTTTTVVVVVVVGGGGKKKKKKKKKEEEEEEEEELLLLLLLLIIIIIIIIDDDDDDDDIIIIIIIIVVVVVVVLLLLLLLLDDDDDDDDRRRRRRRRRRRIIIIIIIIRRRRRRRRRRRKKKKKKKKKLLLLLLLLAAAAADDDDDDDDQQQQQQQQQCCCCCCTTTTTTTGGGGLLLLLLLLQQQQQQQQQGGGGFFFFFFFFFFFLLLLLLLLIIIIIIIIFFFFFFFFFFFHHHHHHHHHHSSSSSSFFFFFFFFFFFGGGGGGGGGGGGTTTTTTTGGGGSSSSSSGGGGFFFFFFFFFFFSSSSSSSSSSSSLLLLLLLLLLLLLLLLMMMMMMMMEEEEEEEEERRRRRRRRRRRLLLLLLLLSSSSSSVVVVVVVDDDDDDDDYYYYYYYYYYYYGGGGKKKKKKKKKKKKKKKKKKSSSSSSKKKKKKKKKLLLLLLLLEEEEEEEEEFFFFFFFFFFFAAAAAVVVVVVVYYYYYYYYYYYYPPPPPPPAAAAAPPPPPPPQQQQQQQQQIIIIIIIISSSSSSTTTTTTTAAAAAVVVVVVVVVVVVVVEEEEEEEEEPPPPPPPYYYYYYYYYYYYNNNNNNNNSSSSSSIIIIIIIILLLLLLLLTTTTTTTTTTTTTTHHHHHHHHHHTTTTTTTTTTTTTTLLLLLLLLEEEEEEEEEHHHHHHHHHHSSSSSSDDDDDDDDCCCCCCAAAAAFFFFFFFFFFFMMMMMMMMVVVVVVVDDDDDDDDNNNNNNNNEEEEEEEEEAAAAAIIIIIIIIYYYYYYYYYYYYDDDDDDDDIIIIIIIICCCCCCRRRRRRRRRRRRRRRRRRRRRRNNNNNNNNLLLLLLLLDDDDDDDDIIIIIIIIEEEEEEEEERRRRRRRRRRRPPPPPPPTTTTTTTYYYYYYYYYYYYTTTTTTTNNNNNNNNLLLLLLLLNNNNNNNNRRRRRRRRRRRLLLLLLLLIIIIIIIIGGGGQQQQQQQQQIIIIIIIIVVVVVVVSSSSSSSSSSSSIIIIIIIITTTTTTTAAAAASSSSSSLLLLLLLLRRRRRRRRRRRFFFFFFFFFFFDDDDDDDDGGGGAAAAALLLLLLLLNNNNNNNNVVVVVVVDDDDDDDDLLLLLLLLTTTTTTTEEEEEEEEEFFFFFFFFFFFQQQQQQQQQTTTTTTTNNNNNNNNLLLLLLLLVVVVVVVPPPPPPPYYYYYYYYYYYYPPPPPPPRRRRRRRRRRRIIIIIIIIHHHHHHHHHHFFFFFFFFFFFPPPPPPPLLLLLLLLAAAAATTTTTTTYYYYYYYYYYYYAAAAAPPPPPPPVVVVVVVIIIIIIIISSSSSSAAAAAEEEEEEEEEKKKKKKKKKAAAAAYYYYYYYYYYYYHHHHHHHHHHEEEEEEEEEQQQQQQQQQLLLLLLLLTTTTTTTVVVVVVVSSSSSSEEEEEEEEEIIIIIIIITTTTTTTNNNNNNNNAAAAACCCCCCFFFFFFFFFFFEEEEEEEEEPPPPPPPAAAAANNNNNNNNQQQQQQQQQMMMMMMMMVVVVVVVKKKKKKKKKCCCCCCDDDDDDDDPPPPPPPRRRRRRRRRRRHHHHHHHHHHGGGGKKKKKKKKKYYYYYYYYYYYYMMMMMMMMAAAAACCCCCCCCCCCCLLLLLLLLLLLLLLLLYYYYYYYYYYYYRRRRRRRRRRRGGGGDDDDDDDDVVVVVVVVVVVVVVPPPPPPPKKKKKKKKKDDDDDDDDVVVVVVVNNNNNNNNAAAAAAAAAAIIIIIIIIAAAAATTTTTTTIIIIIIIIKKKKKKKKKTTTTTTTKKKKKKKKKRRRRRRRRRRRTTTTTTTIIIIIIIIQQQQQQQQQFFFFFFFFFFFVVVVVVVDDDDDDDDWWWWWWWWWWWWWWCCCCCCPPPPPPPTTTTTTTGGGGFFFFFFFFFFFKKKKKKKKKVVVVVVVGGGGIIIIIIIINNNNNNNNYYYYYYYYYYYYQQQQQQQQQPPPPPPPPPPPPPPTTTTTTTVVVVVVVVVVVVVVPPPPPPPGGGGGGGGDDDDDDDDLLLLLLLLAAAAAKKKKKKKKKVVVVVVVQQQQQQQQQRRRRRRRRRRRAAAAAVVVVVVVCCCCCCMMMMMMMMLLLLLLLLSSSSSSNNNNNNNNTTTTTTTTTTTTTTAAAAAIIIIIIIIAAAAAEEEEEEEEEAAAAAWWWWWWWWWWWWWWAAAAARRRRRRRRRRRLLLLLLLLDDDDDDDDHHHHHHHHHHKKKKKKKKKFFFFFFFFFFFDDDDDDDDLLLLLLLLMMMMMMMMYYYYYYYYYYYYAAAAAKKKKKKKKKRRRRRRRRRRRAAAAAFFFFFFFFFFFVVVVVVVHHHHHHHHHHWWWWWWWWWWWWWWYYYYYYYYYYYYVVVVVVVGGGGEEEEEEEEEGGGGMMMMMMMMEEEEEEEEEEEEEEEEEEGGGGEEEEEEEEEFFFFFFFFFFFSSSSSSEEEEEEEEEAAAAARRRRRRRRRRREEEEEEEEEDDDDDDDDLLLLLLLLAAAAAAAAAALLLLLLLLEEEEEEEEEKKKKKKKKKDDDDDDDDYYYYYYYYYYYYEEEEEEEEEEEEEEEEEEVVVVVVVGGGGVVVVVVVDDDDDDDDSSSSSSAAAAADDDDDDDDAAAAAEEEEEEEEEGGGGEEEEEEEEEEEEEEEEEEEEEEEEEEEEEEEEEEEEGGGGDDDDDDDDEEEEEEEEEYYYYYYYYYYYYY

SEQ ID NO: 17 - protein, 3487 aa, Pisum sativum
MMMMMMMMRRRRRRRRRRREEEEEEEEECCCCCCIIIIIIIISSSSSSIIIIIIIIHHHHHHHHHHIIIIIIIIGGGGQQQQQQQQQAAAAAGGGGIIIIIIIIQQQQQQQQQVVVVVVVGGGGNNNNNNNNAAAAACCCCCCWWWWWWWWWWWWWWEEEEEEEEELLLLLLLLYYYYYYYYYYYYCCCCCCLLLLLLLLEEEEEEEEEHHHHHHHHHHGGGGIIIIIIIIQQQQQQQQQPPPPPPPDDDDDDDDGGGGQQQQQQQQQMMMMMMMMPPPPPPPGGGGDDDDDDDDKKKKKKKKKTTTTTTTVVVVVVVGGGGGGGGGGGGDDDDDDDDDDDDDDDDAAAAAFFFFFFFFFFFNNNNNNNNTTTTTTTFFFFFFFFFFFFFFFFFFFFFFSSSSSSEEEEEEEEETTTTTTTGGGGAAAAAGGGGKKKKKKKKKHHHHHHHHHHVVVVVVVPPPPPPPRRRRRRRRRRRAAAAAVVVVVVVFFFFFFFFFFFVVVVVVVDDDDDDDDLLLLLLLLEEEEEEEEEPPPPPPPTTTTTTTVVVVVVVIIIIIIIIDDDDDDDDEEEEEEEEEVVVVVVVRRRRRRRRRRRTTTTTTTGGGGAAAAAYYYYYYYYYYYYRRRRRRRRRRRQQQQQQQQQLLLLLLLLFFFFFFFFFFFHHHHHHHHHHPPPPPPPEEEEEEEEEQQQQQQQQQLLLLLLLLIIIIIIIISSSSSSGGGGKKKKKKKKKEEEEEEEEEDDDDDDDDAAAAAAAAAANNNNNNNNNNNNNNNNFFFFFFFFFFFAAAAARRRRRRRRRRRGGGGHHHHHHHHHHYYYYYYYYYYYYTTTTTTTIIIIIIIIGGGGKKKKKKKKKEEEEEEEEEIIIIIIIIVVVVVVVDDDDDDDDLLLLLLLLCCCCCCLLLLLLLLDDDDDDDDRRRRRRRRRRRIIIIIIIIRRRRRRRRRRRKKKKKKKKKLLLLLLLLAAAAADDDDDDDDNNNNNNNNCCCCCCTTTTTTTGGGGLLLLLLLLQQQQQQQQQGGGGFFFFFFFFFFFLLLLLLLLVVVVVVVFFFFFFFFFFFNNNNNNNNAAAAAVVVVVVVGGGGGGGGGGGGTTTTTTTGGGGSSSSSSGGGGLLLLLLLLGGGGSSSSSSLLLLLLLLLLLLLLLLLLLLLLLLEEEEEEEEERRRRRRRRRRRLLLLLLLLSSSSSSVVVVVVVDDDDDDDDYYYYYYYYYYYYGGGGKKKKKKKKKKKKKKKKKKSSSSSSKKKKKKKKKLLLLLLLLGGGGFFFFFFFFFFFTTTTTTTVVVVVVVYYYYYYYYYYYYPPPPPPPSSSSSSPPPPPPPQQQQQQQQQVVVVVVVSSSSSSTTTTTTTSSSSSSVVVVVVVVVVVVVVEEEEEEEEEPPPPPPPYYYYYYYYYYYYNNNNNNNNSSSSSSVVVVVVVLLLLLLLLSSSSSSTTTTTTTHHHHHHHHHHSSSSSSLLLLLLLLLLLLLLLLEEEEEEEEEHHHHHHHHHHTTTTTTTDDDDDDDDVVVVVVVAAAAAVVVVVVVLLLLLLLLLLLLLLLLDDDDDDDDNNNNNNNNEEEEEEEEEAAAAAIIIIIIIIYYYYYYYYYYYYDDDDDDDDIIIIIIIICCCCCCRRRRRRRRRRRRRRRRRRRRRRSSSSSSLLLLLLLLDDDDDDDDIIIIIIIIEEEEEEEEERRRRRRRRRRRPPPPPPPTTTTTTTYYYYYYYYYYYYTTTTTTTNNNNNNNNLLLLLLLLNNNNNNNNRRRRRRRRRRRLLLLLLLLVVVVVVVSSSSSSQQQQQQQQQVVVVVVVIIIIIIIISSSSSSSSSSSSLLLLLLLLTTTTTTTAAAAASSSSSSLLLLLLLLRRRRRRRRRRRFFFFFFFFFFFDDDDDDDDGGGGAAAAALLLLLLLLNNNNNNNNVVVVVVVDDDDDDDDVVVVVVVTTTTTTTEEEEEEEEEFFFFFFFFFFFQQQQQQQQQTTTTTTTNNNNNNNNLLLLLLLLVVVVVVVPPPPPPPYYYYYYYYYYYYPPPPPPPRRRRRRRRRRRIIIIIIIIHHHHHHHHHHFFFFFFFFFFFMMMMMMMMLLLLLLLLSSSSSSSSSSSSYYYYYYYYYYYYAAAAAPPPPPPPVVVVVVVIIIIIIIISSSSSSAAAAAEEEEEEEEEKKKKKKKKKAAAAAYYYYYYYYYYYYHHHHHHHHHHEEEEEEEEEQQQQQQQQQLLLLLLLLSSSSSSVVVVVVVAAAAAEEEEEEEEEIIIIIIIITTTTTTTNNNNNNNNSSSSSSAAAAAFFFFFFFFFFFEEEEEEEEEPPPPPPPSSSSSSSSSSSSMMMMMMMMMMMMMMMMAAAAAKKKKKKKKKCCCCCCDDDDDDDDPPPPPPPRRRRRRRRRRRHHHHHHHHHHGGGGKKKKKKKKKYYYYYYYYYYYYMMMMMMMMAAAAACCCCCCCCCCCCLLLLLLLLMMMMMMMMYYYYYYYYYYYYRRRRRRRRRRRGGGGDDDDDDDDVVVVVVVVVVVVVVPPPPPPPKKKKKKKKKDDDDDDDDVVVVVVVNNNNNNNNAAAAAAAAAAVVVVVVVAAAAATTTTTTTIIIIIIIIKKKKKKKKKTTTTTTTKKKKKKKKKRRRRRRRRRRRTTTTTTTIIIIIIIIQQQQQQQQQFFFFFFFFFFFVVVVVVVDDDDDDDDWWWWWWWWWWWWWWCCCCCCPPPPPPPTTTTTTTGGGGFFFFFFFFFFFKKKKKKKKKCCCCCCGGGGIIIIIIIINNNNNNNNYYYYYYYYYYYYQQQQQQQQQPPPPPPPPPPPPPPTTTTTTTVVVVVVVVVVVVVVPPPPPPPGGGGGGGGDDDDDDDDLLLLLLLLAAAAAKKKKKKKKKVVVVVVVQQQQQQQQQRRRRRRRRRRRAAAAAVVVVVVVCCCCCCMMMMMMMMIIIIIIIISSSSSSNNNNNNNNSSSSSSTTTTTTTSSSSSSVVVVVVVAAAAAEEEEEEEEEVVVVVVVFFFFFFFFFFFSSSSSSRRRRRRRRRRRIIIIIIIIDDDDDDDDHHHHHHHHHHKKKKKKKKKFFFFFFFFFFFDDDDDDDDLLLLLLLLMMMMMMMMYYYYYYYYYYYYAAAAAKKKKKKKKKRRRRRRRRRRRAAAAAFFFFFFFFFFFVVVVVVVHHHHHHHHHHWWWWWWWWWWWWWWYYYYYYYYYYYYVVVVVVVGGGGEEEEEEEEEGGGGMMMMMMMMEEEEEEEEEEEEEEEEEEGGGGEEEEEEEEEFFFFFFFFFFFSSSSSSEEEEEEEEEAAAAARRRRRRRRRRREEEEEEEEEDDDDDDDDLLLLLLLLAAAAAAAAAALLLLLLLLEEEEEEEEEKKKKKKKKKDDDDDDDDYYYYYYYYYYYYEEEEEEEEEEEEEEEEEEVVVVVVVGGGGAAAAAEEEEEEEEESSSSSSGGGGDDDDDDDDGGGGDDDDDDDDDDDDDDDDDDDDDDDDGGGGLLLLLLLLGGGGEEEEEEEEEEEEEEEEEEEEEEEEEEEYYYYYYYYYYYYY

SEQ ID NO: 18 - protein, 3505 aa, Pelvetia fastigiata
MMMMMMMMRRRRRRRRRRREEEEEEEEECCCCCCIIIIIIIISSSSSSIIIIIIIIHHHHHHHHHHIIIIIIIIGGGGQQQQQQQQQAAAAAGGGGIIIIIIIIQQQQQQQQQVVVVVVVGGGGNNNNNNNNAAAAACCCCCCWWWWWWWWWWWWWWEEEEEEEEELLLLLLLLYYYYYYYYYYYYCCCCCCLLLLLLLLEEEEEEEEEHHHHHHHHHHGGGGIIIIIIIIQQQQQQQQQPPPPPPPNNNNNNNNGGGGQQQQQQQQQMMMMMMMMPPPPPPPAAAAADDDDDDDDNNNNNNNNTTTTTTTTTTTTTTGGGGGGGGGGGGDDDDDDDDDDDDDDDDAAAAAFFFFFFFFFFFNNNNNNNNTTTTTTTFFFFFFFFFFFFFFFFFFFFFFSSSSSSEEEEEEEEETTTTTTTGGGGAAAAAGGGGKKKKKKKKKHHHHHHHHHHVVVVVVVPPPPPPPRRRRRRRRRRRAAAAAVVVVVVVYYYYYYYYYYYYVVVVVVVDDDDDDDDLLLLLLLLEEEEEEEEEPPPPPPPTTTTTTTVVVVVVVCCCCCCDDDDDDDDEEEEEEEEEVVVVVVVRRRRRRRRRRRTTTTTTTGGGGSSSSSSYYYYYYYYYYYYRRRRRRRRRRRQQQQQQQQQLLLLLLLLYYYYYYYYYYYYHHHHHHHHHHPPPPPPPEEEEEEEEEQQQQQQQQQIIIIIIIIIIIIIIIISSSSSSGGGGKKKKKKKKKEEEEEEEEEDDDDDDDDAAAAAAAAAANNNNNNNNNNNNNNNNYYYYYYYYYYYYAAAAARRRRRRRRRRRGGGGHHHHHHHHHHYYYYYYYYYYYYTTTTTTTIIIIIIIIGGGGKKKKKKKKKEEEEEEEEEIIIIIIIIVVVVVVVDDDDDDDDIIIIIIIIVVVVVVVLLLLLLLLDDDDDDDDRRRRRRRRRRRIIIIIIIIRRRRRRRRRRRKKKKKKKKKLLLLLLLLSSSSSSDDDDDDDDNNNNNNNNCCCCCCTTTTTTTGGGGLLLLLLLLQQQQQQQQQGGGGFFFFFFFFFFFLLLLLLLLVVVVVVVFFFFFFFFFFFHHHHHHHHHHAAAAATTTTTTTGGGGGGGGGGGGTTTTTTTGGGGSSSSSSGGGGLLLLLLLLGGGGSSSSSSLLLLLLLLLLLLLLLLLLLLLLLLEEEEEEEEERRRRRRRRRRRLLLLLLLLSSSSSSVVVVVVVDDDDDDDDYYYYYYYYYYYYGGGGRRRRRRRRRRRKKKKKKKKKSSSSSSKKKKKKKKKLLLLLLLLSSSSSSFFFFFFFFFFFAAAAAIIIIIIIITTTTTTTPPPPPPPAAAAAPPPPPPPQQQQQQQQQVVVVVVVAAAAATTTTTTTAAAAAVVVVVVVVVVVVVVEEEEEEEEEPPPPPPPYYYYYYYYYYYYNNNNNNNNSSSSSSVVVVVVVLLLLLLLLSSSSSSTTTTTTTHHHHHHHHHHAAAAALLLLLLLLLLLLLLLLEEEEEEEEEHHHHHHHHHHTTTTTTTDDDDDDDDCCCCCCTTTTTTTFFFFFFFFFFFCCCCCCLLLLLLLLDDDDDDDDNNNNNNNNEEEEEEEEEAAAAALLLLLLLLYYYYYYYYYYYYDDDDDDDDVVVVVVVCCCCCCRRRRRRRRRRRRRRRRRRRRRRNNNNNNNNLLLLLLLLDDDDDDDDIIIIIIIIEEEEEEEEERRRRRRRRRRRPPPPPPPTTTTTTTYYYYYYYYYYYYTTTTTTTNNNNNNNNLLLLLLLLNNNNNNNNRRRRRRRRRRRLLLLLLLLVVVVVVVAAAAAQQQQQQQQQVVVVVVVIIIIIIIISSSSSSSSSSSSLLLLLLLLTTTTTTTAAAAASSSSSSLLLLLLLLRRRRRRRRRRRFFFFFFFFFFFDDDDDDDDGGGGAAAAALLLLLLLLNNNNNNNNVVVVVVVDDDDDDDDVVVVVVVTTTTTTTEEEEEEEEEFFFFFFFFFFFQQQQQQQQQTTTTTTTNNNNNNNNLLLLLLLLVVVVVVVPPPPPPPYYYYYYYYYYYYPPPPPPPRRRRRRRRRRRIIIIIIIIHHHHHHHHHHFFFFFFFFFFFMMMMMMMMLLLLLLLLTTTTTTTSSSSSSYYYYYYYYYYYYAAAAAPPPPPPPIIIIIIIIIIIIIIIISSSSSSAAAAAEEEEEEEEEKKKKKKKKKAAAAAYYYYYYYYYYYYHHHHHHHHHHEEEEEEEEEQQQQQQQQQLLLLLLLLSSSSSSVVVVVVVAAAAAEEEEEEEEEIIIIIIIITTTTTTTNNNNNNNNSSSSSSVVVVVVVFFFFFFFFFFFEEEEEEEEEPPPPPPPAAAAAGGGGMMMMMMMMMMMMMMMMTTTTTTTKKKKKKKKKCCCCCCDDDDDDDDPPPPPPPRRRRRRRRRRRHHHHHHHHHHGGGGKKKKKKKKKYYYYYYYYYYYYMMMMMMMMAAAAACCCCCCCCCCCCLLLLLLLLMMMMMMMMYYYYYYYYYYYYRRRRRRRRRRRGGGGDDDDDDDDVVVVVVVVVVVVVVPPPPPPPKKKKKKKKKDDDDDDDDVVVVVVVNNNNNNNNAAAAAAAAAAVVVVVVVAAAAATTTTTTTIIIIIIIIKKKKKKKKKTTTTTTTKKKKKKKKKRRRRRRRRRRRTTTTTTTIIIIIIIIQQQQQQQQQFFFFFFFFFFFVVVVVVVDDDDDDDDWWWWWWWWWWWWWWCCCCCCPPPPPPPTTTTTTTGGGGFFFFFFFFFFFKKKKKKKKKCCCCCCGGGGIIIIIIIINNNNNNNNYYYYYYYYYYYYQQQQQQQQQPPPPPPPPPPPPPPTTTTTTTAAAAAVVVVVVVPPPPPPPGGGGGGGGDDDDDDDDLLLLLLLLAAAAARRRRRRRRRRRVVVVVVVQQQQQQQQQRRRRRRRRRRRAAAAAVVVVVVVCCCCCCMMMMMMMMVVVVVVVAAAAANNNNNNNNTTTTTTTTTTTTTTAAAAAIIIIIIIIAAAAAEEEEEEEEEAAAAALLLLLLLLSSSSSSRRRRRRRRRRRIIIIIIIIDDDDDDDDHHHHHHHHHHKKKKKKKKKFFFFFFFFFFFDDDDDDDDLLLLLLLLMMMMMMMMYYYYYYYYYYYYAAAAAKKKKKKKKKRRRRRRRRRRRAAAAAFFFFFFFFFFFVVVVVVVHHHHHHHHHHWWWWWWWWWWWWWWYYYYYYYYYYYYVVVVVVVGGGGEEEEEEEEEGGGGMMMMMMMMEEEEEEEEEEEEEEEEEEGGGGEEEEEEEEEFFFFFFFFFFFSSSSSSEEEEEEEEEAAAAARRRRRRRRRRREEEEEEEEEDDDDDDDDLLLLLLLLVVVVVVVAAAAALLLLLLLLEEEEEEEEEKKKKKKKKKDDDDDDDDYYYYYYYYYYYYEEEEEEEEEEEEEEEEEEVVVVVVVGGGGAAAAAEEEEEEEEETTTTTTTAAAAADDDDDDDDGGGGDDDDDDDDGGGGEEEEEEEEEEEEEEEEEEEEEEEEEEEEEEEEEEEEFFFFFFFFFFFGGGGEEEEEEEEEEEEEEEEEEYYYYYYYYYYYYY

SEQ ID NO: 19 - protein, 3544 aa, Pneumocystis carinii
MMMMMMMMRRRRRRRRRRREEEEEEEEEVVVVVVVIIIIIIIISSSSSSIIIIIIIIHHHHHHHHHHVVVVVVVGGGGQQQQQQQQQAAAAAGGGGTTTTTTTQQQQQQQQQIIIIIIIIGGGGNNNNNNNNAAAAACCCCCCWWWWWWWWWWWWWWEEEEEEEEELLLLLLLLYYYYYYYYYYYYCCCCCCLLLLLLLLEEEEEEEEEHHHHHHHHHHGGGGIIIIIIIIEEEEEEEEEPPPPPPPDDDDDDDDGGGGRRRRRRRRRRRLLLLLLLLSSSSSSPPPPPPPEEEEEEEEEKKKKKKKKKTTTTTTTTTTTTTTKKKKKKKKKPPPPPPPLLLLLLLLDDDDDDDDDDDDDDDDGGGGFFFFFFFFFFFSSSSSSTTTTTTTFFFFFFFFFFFFFFFFFFFFFFSSSSSSEEEEEEEEETTTTTTTGGGGSSSSSSGGGGKKKKKKKKKYYYYYYYYYYYYVVVVVVVPPPPPPPRRRRRRRRRRRSSSSSSIIIIIIIIYYYYYYYYYYYYVVVVVVVDDDDDDDDLLLLLLLLEEEEEEEEEPPPPPPPNNNNNNNNVVVVVVVIIIIIIIIDDDDDDDDQQQQQQQQQVVVVVVVRRRRRRRRRRRTTTTTTTGGGGTTTTTTTYYYYYYYYYYYYRRRRRRRRRRRHHHHHHHHHHLLLLLLLLFFFFFFFFFFFHHHHHHHHHHPPPPPPPEEEEEEEEEQQQQQQQQQLLLLLLLLIIIIIIIITTTTTTTGGGGKKKKKKKKKEEEEEEEEEDDDDDDDDAAAAAAAAAANNNNNNNNNNNNNNNNYYYYYYYYYYYYAAAAARRRRRRRRRRRGGGGHHHHHHHHHHYYYYYYYYYYYYTTTTTTTVVVVVVVGGGGKKKKKKKKKEEEEEEEEELLLLLLLLIIIIIIIIDDDDDDDDHHHHHHHHHHVVVVVVVLLLLLLLLDDDDDDDDRRRRRRRRRRRIIIIIIIIRRRRRRRRRRRRRRRRRRRRRRVVVVVVVAAAAADDDDDDDDNNNNNNNNCCCCCCTTTTTTTGGGGLLLLLLLLQQQQQQQQQGGGGFFFFFFFFFFFLLLLLLLLVVVVVVVFFFFFFFFFFFHHHHHHHHHHSSSSSSFFFFFFFFFFFGGGGGGGGGGGGTTTTTTTGGGGSSSSSSGGGGFFFFFFFFFFFGGGGAAAAALLLLLLLLLLLLLLLLLLLLLLLLEEEEEEEEERRRRRRRRRRRLLLLLLLLSSSSSSVVVVVVVDDDDDDDDYYYYYYYYYYYYGGGGKKKKKKKKKKKKKKKKKKSSSSSSKKKKKKKKKLLLLLLLLEEEEEEEEEFFFFFFFFFFFSSSSSSVVVVVVVYYYYYYYYYYYYPPPPPPPAAAAAPPPPPPPQQQQQQQQQVVVVVVVSSSSSSTTTTTTTSSSSSSVVVVVVVVVVVVVVEEEEEEEEEPPPPPPPYYYYYYYYYYYYNNNNNNNNSSSSSSIIIIIIIILLLLLLLLTTTTTTTTTTTTTTHHHHHHHHHHTTTTTTTTTTTTTTLLLLLLLLEEEEEEEEEHHHHHHHHHHSSSSSSDDDDDDDDCCCCCCSSSSSSFFFFFFFFFFFMMMMMMMMVVVVVVVDDDDDDDDNNNNNNNNEEEEEEEEEAAAAAIIIIIIIIYYYYYYYYYYYYDDDDDDDDIIIIIIIICCCCCCRRRRRRRRRRRRRRRRRRRRRRNNNNNNNNLLLLLLLLDDDDDDDDIIIIIIIIEEEEEEEEERRRRRRRRRRRPPPPPPPGGGGYYYYYYYYYYYYEEEEEEEEENNNNNNNNLLLLLLLLNNNNNNNNRRRRRRRRRRRLLLLLLLLIIIIIIIIAAAAAQQQQQQQQQVVVVVVVVVVVVVVSSSSSSSSSSSSIIIIIIIITTTTTTTAAAAASSSSSSLLLLLLLLRRRRRRRRRRRFFFFFFFFFFFDDDDDDDDGGGGSSSSSSLLLLLLLLNNNNNNNNVVVVVVVDDDDDDDDLLLLLLLLNNNNNNNNEEEEEEEEEFFFFFFFFFFFQQQQQQQQQTTTTTTTNNNNNNNNLLLLLLLLVVVVVVVPPPPPPPYYYYYYYYYYYYPPPPPPPRRRRRRRRRRRIIIIIIIIHHHHHHHHHHFFFFFFFFFFFPPPPPPPLLLLLLLLVVVVVVVTTTTTTTYYYYYYYYYYYYAAAAAPPPPPPPLLLLLLLLIIIIIIIISSSSSSAAAAAAAAAAKKKKKKKKKAAAAAHHHHHHHHHHHHHHHHHHHHEEEEEEEEEAAAAANNNNNNNNSSSSSSVVVVVVVAAAAAEEEEEEEEEIIIIIIIITTTTTTTNNNNNNNNAAAAACCCCCCFFFFFFFFFFFEEEEEEEEEPPPPPPPNNNNNNNNNNNNNNNNQQQQQQQQQMMMMMMMMVVVVVVVKKKKKKKKKCCCCCCDDDDDDDDPPPPPPPRRRRRRRRRRRNNNNNNNNGGGGKKKKKKKKKYYYYYYYYYYYYMMMMMMMMAAAAATTTTTTTCCCCCCLLLLLLLLLLLLLLLLYYYYYYYYYYYYRRRRRRRRRRRGGGGDDDDDDDDIIIIIIIIVVVVVVVTTTTTTTKKKKKKKKKDDDDDDDDVVVVVVVNNNNNNNNCCCCCCAAAAAVVVVVVVSSSSSSSSSSSSIIIIIIIIRRRRRRRRRRRTTTTTTTKKKKKKKKKRRRRRRRRRRRTTTTTTTIIIIIIIIQQQQQQQQQFFFFFFFFFFFVVVVVVVDDDDDDDDWWWWWWWWWWWWWWCCCCCCPPPPPPPTTTTTTTGGGGFFFFFFFFFFFKKKKKKKKKLLLLLLLLGGGGVVVVVVVCCCCCCYYYYYYYYYYYYQQQQQQQQQPPPPPPPPPPPPPPQQQQQQQQQYYYYYYYYYYYYVVVVVVVPPPPPPPNNNNNNNNGGGGDDDDDDDDLLLLLLLLAAAAAKKKKKKKKKVVVVVVVNNNNNNNNRRRRRRRRRRRAAAAAVVVVVVVCCCCCCMMMMMMMMLLLLLLLLSSSSSSNNNNNNNNTTTTTTTTTTTTTTSSSSSSIIIIIIIIAAAAAEEEEEEEEEAAAAAWWWWWWWWWWWWWWSSSSSSRRRRRRRRRRRLLLLLLLLDDDDDDDDHHHHHHHHHHKKKKKKKKKFFFFFFFFFFFDDDDDDDDLLLLLLLLMMMMMMMMYYYYYYYYYYYYSSSSSSKKKKKKKKKRRRRRRRRRRRAAAAAFFFFFFFFFFFVVVVVVVHHHHHHHHHHWWWWWWWWWWWWWWYYYYYYYYYYYYVVVVVVVGGGGEEEEEEEEEGGGGMMMMMMMMEEEEEEEEEEEEEEEEEEGGGGEEEEEEEEEFFFFFFFFFFFSSSSSSEEEEEEEEEAAAAARRRRRRRRRRREEEEEEEEEDDDDDDDDLLLLLLLLAAAAAAAAAALLLLLLLLEEEEEEEEEKKKKKKKKKDDDDDDDDYYYYYYYYYYYYEEEEEEEEEEEEEEEEEEVVVVVVVGGGGQQQQQQQQQDDDDDDDDSSSSSSIIIIIIIIEEEEEEEEEGGGGEEEEEEEEEIIIIIIIIMMMMMMMMEEEEEEEEEEEEEEEEEEEEEEEEEEEYYYYYYYYYYYYY

SEQ ID NO: 20 - protein, 3593 aa, Schizosaccharomyces pombe
MMMMMMMMRRRRRRRRRRREEEEEEEEEVVVVVVVIIIIIIIISSSSSSVVVVVVVHHHHHHHHHHVVVVVVVGGGGQQQQQQQQQAAAAAGGGGVVVVVVVQQQQQQQQQIIIIIIIIGGGGNNNNNNNNAAAAACCCCCCWWWWWWWWWWWWWWEEEEEEEEELLLLLLLLYYYYYYYYYYYYCCCCCCLLLLLLLLEEEEEEEEEHHHHHHHHHHGGGGIIIIIIIIGGGGPPPPPPPDDDDDDDDGGGGFFFFFFFFFFFPPPPPPPTTTTTTTEEEEEEEEENNNNNNNNSSSSSSEEEEEEEEEVVVVVVVHHHHHHHHHHKKKKKKKKKNNNNNNNNNNNNNNNNSSSSSSYYYYYYYYYYYYLLLLLLLLNNNNNNNNDDDDDDDDGGGGFFFFFFFFFFFGGGGTTTTTTTFFFFFFFFFFFFFFFFFFFFFFSSSSSSEEEEEEEEETTTTTTTGGGGQQQQQQQQQGGGGKKKKKKKKKFFFFFFFFFFFVVVVVVVPPPPPPPRRRRRRRRRRRSSSSSSIIIIIIIIYYYYYYYYYYYYVVVVVVVDDDDDDDDLLLLLLLLEEEEEEEEEPPPPPPPNNNNNNNNVVVVVVVIIIIIIIIDDDDDDDDQQQQQQQQQVVVVVVVRRRRRRRRRRRTTTTTTTGGGGPPPPPPPYYYYYYYYYYYYKKKKKKKKKDDDDDDDDLLLLLLLLFFFFFFFFFFFHHHHHHHHHHPPPPPPPEEEEEEEEEQQQQQQQQQMMMMMMMMVVVVVVVTTTTTTTGGGGKKKKKKKKKEEEEEEEEEDDDDDDDDAAAAASSSSSSNNNNNNNNNNNNNNNNYYYYYYYYYYYYAAAAARRRRRRRRRRRGGGGHHHHHHHHHHYYYYYYYYYYYYTTTTTTTVVVVVVVGGGGKKKKKKKKKEEEEEEEEEMMMMMMMMIIIIIIIIDDDDDDDDSSSSSSVVVVVVVLLLLLLLLEEEEEEEEERRRRRRRRRRRIIIIIIIIRRRRRRRRRRRRRRRRRRRRRRMMMMMMMMAAAAADDDDDDDDNNNNNNNNCCCCCCSSSSSSGGGGLLLLLLLLQQQQQQQQQGGGGFFFFFFFFFFFLLLLLLLLVVVVVVVFFFFFFFFFFFHHHHHHHHHHSSSSSSFFFFFFFFFFFGGGGGGGGGGGGTTTTTTTGGGGSSSSSSGGGGLLLLLLLLGGGGAAAAALLLLLLLLLLLLLLLLLLLLLLLLEEEEEEEEERRRRRRRRRRRLLLLLLLLNNNNNNNNMMMMMMMMEEEEEEEEEYYYYYYYYYYYYGGGGKKKKKKKKKKKKKKKKKKSSSSSSNNNNNNNNLLLLLLLLQQQQQQQQQFFFFFFFFFFFSSSSSSVVVVVVVYYYYYYYYYYYYPPPPPPPAAAAAPPPPPPPQQQQQQQQQVVVVVVVSSSSSSTTTTTTTSSSSSSVVVVVVVVVVVVVVEEEEEEEEEPPPPPPPYYYYYYYYYYYYNNNNNNNNSSSSSSVVVVVVVLLLLLLLLTTTTTTTTTTTTTTHHHHHHHHHHAAAAATTTTTTTLLLLLLLLDDDDDDDDNNNNNNNNSSSSSSDDDDDDDDCCCCCCTTTTTTTFFFFFFFFFFFMMMMMMMMVVVVVVVDDDDDDDDNNNNNNNNEEEEEEEEEAAAAACCCCCCYYYYYYYYYYYYDDDDDDDDIIIIIIIICCCCCCRRRRRRRRRRRRRRRRRRRRRRNNNNNNNNLLLLLLLLDDDDDDDDIIIIIIIIEEEEEEEEERRRRRRRRRRRPPPPPPPTTTTTTTYYYYYYYYYYYYEEEEEEEEENNNNNNNNLLLLLLLLNNNNNNNNRRRRRRRRRRRLLLLLLLLIIIIIIIIAAAAAQQQQQQQQQVVVVVVVVVVVVVVSSSSSSSSSSSSIIIIIIIITTTTTTTAAAAASSSSSSLLLLLLLLRRRRRRRRRRRFFFFFFFFFFFAAAAAGGGGSSSSSSLLLLLLLLNNNNNNNNVVVVVVVDDDDDDDDLLLLLLLLNNNNNNNNEEEEEEEEEFFFFFFFFFFFQQQQQQQQQTTTTTTTNNNNNNNNLLLLLLLLVVVVVVVPPPPPPPYYYYYYYYYYYYPPPPPPPRRRRRRRRRRRIIIIIIIIHHHHHHHHHHFFFFFFFFFFFPPPPPPPLLLLLLLLVVVVVVVTTTTTTTYYYYYYYYYYYYSSSSSSPPPPPPPIIIIIIIIVVVVVVVSSSSSSAAAAAAAAAAKKKKKKKKKAAAAAFFFFFFFFFFFHHHHHHHHHHEEEEEEEEESSSSSSNNNNNNNNSSSSSSVVVVVVVQQQQQQQQQEEEEEEEEEIIIIIIIITTTTTTTNNNNNNNNQQQQQQQQQCCCCCCFFFFFFFFFFFEEEEEEEEEPPPPPPPYYYYYYYYYYYYNNNNNNNNQQQQQQQQQMMMMMMMMVVVVVVVKKKKKKKKKCCCCCCDDDDDDDDPPPPPPPRRRRRRRRRRRTTTTTTTGGGGRRRRRRRRRRRYYYYYYYYYYYYMMMMMMMMAAAAATTTTTTTCCCCCCLLLLLLLLLLLLLLLLYYYYYYYYYYYYRRRRRRRRRRRGGGGDDDDDDDDVVVVVVVIIIIIIIIPPPPPPPRRRRRRRRRRRDDDDDDDDVVVVVVVQQQQQQQQQAAAAAAAAAAVVVVVVVTTTTTTTSSSSSSIIIIIIIIKKKKKKKKKSSSSSSRRRRRRRRRRRRRRRRRRRRRRTTTTTTTIIIIIIIIQQQQQQQQQFFFFFFFFFFFVVVVVVVDDDDDDDDWWWWWWWWWWWWWWCCCCCCPPPPPPPTTTTTTTGGGGFFFFFFFFFFFKKKKKKKKKIIIIIIIIGGGGIIIIIIIICCCCCCYYYYYYYYYYYYEEEEEEEEEPPPPPPPPPPPPPPQQQQQQQQQHHHHHHHHHHVVVVVVVPPPPPPPGGGGSSSSSSGGGGIIIIIIIIAAAAAKKKKKKKKKVVVVVVVNNNNNNNNRRRRRRRRRRRAAAAAVVVVVVVCCCCCCMMMMMMMMLLLLLLLLSSSSSSNNNNNNNNTTTTTTTTTTTTTTSSSSSSIIIIIIIIAAAAAEEEEEEEEEAAAAAWWWWWWWWWWWWWWSSSSSSRRRRRRRRRRRLLLLLLLLDDDDDDDDHHHHHHHHHHKKKKKKKKKFFFFFFFFFFFDDDDDDDDLLLLLLLLMMMMMMMMYYYYYYYYYYYYSSSSSSKKKKKKKKKRRRRRRRRRRRAAAAAFFFFFFFFFFFVVVVVVVHHHHHHHHHHWWWWWWWWWWWWWWYYYYYYYYYYYYVVVVVVVGGGGEEEEEEEEEGGGGMMMMMMMMEEEEEEEEEEEEEEEEEEGGGGEEEEEEEEEFFFFFFFFFFFSSSSSSEEEEEEEEEAAAAARRRRRRRRRRREEEEEEEEEDDDDDDDDLLLLLLLLAAAAAAAAAALLLLLLLLEEEEEEEEERRRRRRRRRRRDDDDDDDDYYYYYYYYYYYYEEEEEEEEEEEEEEEEEEVVVVVVVGGGGQQQQQQQQQDDDDDDDDSSSSSSMMMMMMMMDDDDDDDDNNNNNNNNEEEEEEEEEMMMMMMMMYYYYYYYYYYYYEEEEEEEEEAAAAADDDDDDDDEEEEEEEEEEEEEEEEEEYYYYYYYYYYYYY

SEQ ID NO: 21 - protein, 3447 aa, Stylonychia lemnae
MMMMMMMMRRRRRRRRRRREEEEEEEEEVVVVVVVIIIIIIIISSSSSSIIIIIIIIHHHHHHHHHHVVVVVVVGGGGQQQQQQQQQAAAAAGGGGIIIIIIIIQQQQQQQQQIIIIIIIIGGGGNNNNNNNNAAAAACCCCCCWWWWWWWWWWWWWWEEEEEEEEELLLLLLLLFFFFFFFFFFFCCCCCCLLLLLLLLEEEEEEEEEHHHHHHHHHHGGGGIIIIIIIIQQQQQQQQQPPPPPPPDDDDDDDDGGGGQQQQQQQQQMMMMMMMMPPPPPPPSSSSSSDDDDDDDDKKKKKKKKKTTTTTTTIIIIIIIIGGGGGGGGGGGGDDDDDDDDDDDDDDDDAAAAAFFFFFFFFFFFNNNNNNNNTTTTTTTFFFFFFFFFFFFFFFFFFFFFFSSSSSSEEEEEEEEETTTTTTTGGGGAAAAAEEEEEEEEEKKKKKKKKKHHHHHHHHHHVVVVVVVPPPPPPPRRRRRRRRRRRCCCCCCVVVVVVVFFFFFFFFFFFLLLLLLLLDDDDDDDDLLLLLLLLEEEEEEEEEPPPPPPPTTTTTTTVVVVVVVIIIIIIIIDDDDDDDDEEEEEEEEEVVVVVVVRRRRRRRRRRRTTTTTTTGGGGTTTTTTTYYYYYYYYYYYYRRRRRRRRRRRQQQQQQQQQLLLLLLLLFFFFFFFFFFFHHHHHHHHHHPPPPPPPEEEEEEEEEQQQQQQQQQLLLLLLLLIIIIIIIISSSSSSGGGGKKKKKKKKKEEEEEEEEEDDDDDDDDAAAAAAAAAANNNNNNNNNNNNNNNNFFFFFFFFFFFAAAAARRRRRRRRRRRGGGGHHHHHHHHHHYYYYYYYYYYYYTTTTTTTIIIIIIIIGGGGKKKKKKKKKEEEEEEEEEIIIIIIIIVVVVVVVDDDDDDDDLLLLLLLLCCCCCCLLLLLLLLDDDDDDDDRRRRRRRRRRRIIIIIIIIRRRRRRRRRRRKKKKKKKKKLLLLLLLLAAAAADDDDDDDDQQQQQQQQQCCCCCCTTTTTTTGGGGLLLLLLLLQQQQQQQQQGGGGFFFFFFFFFFFLLLLLLLLVVVVVVVFFFFFFFFFFFNNNNNNNNSSSSSSVVVVVVVGGGGGGGGGGGGTTTTTTTGGGGSSSSSSGGGGLLLLLLLLGGGGSSSSSSLLLLLLLLLLLLLLLLLLLLLLLLEEEEEEEEERRRRRRRRRRRLLLLLLLLSSSSSSVVVVVVVDDDDDDDDYYYYYYYYYYYYGGGGKKKKKKKKKKKKKKKKKKSSSSSSKKKKKKKKKLLLLLLLLGGGGFFFFFFFFFFFTTTTTTTVVVVVVVYYYYYYYYYYYYPPPPPPPSSSSSSPPPPPPPQQQQQQQQQVVVVVVVSSSSSSTTTTTTTAAAAAVVVVVVVVVVVVVVEEEEEEEEEPPPPPPPYYYYYYYYYYYYNNNNNNNNSSSSSSVVVVVVVLLLLLLLLSSSSSSTTTTTTTHHHHHHHHHHSSSSSSLLLLLLLLLLLLLLLLEEEEEEEEEHHHHHHHHHHTTTTTTTDDDDDDDDVVVVVVVAAAAAVVVVVVVMMMMMMMMLLLLLLLLDDDDDDDDNNNNNNNNEEEEEEEEEAAAAAVVVVVVVYYYYYYYYYYYYDDDDDDDDIIIIIIIICCCCCCRRRRRRRRRRRRRRRRRRRRRRNNNNNNNNLLLLLLLLDDDDDDDDIIIIIIIIEEEEEEEEERRRRRRRRRRRPPPPPPPTTTTTTTYYYYYYYYYYYYTTTTTTTNNNNNNNNLLLLLLLLNNNNNNNNRRRRRRRRRRRLLLLLLLLIIIIIIIIAAAAAQQQQQQQQQVVVVVVVIIIIIIIISSSSSSSSSSSSLLLLLLLLTTTTTTTAAAAASSSSSSLLLLLLLLRRRRRRRRRRRFFFFFFFFFFFDDDDDDDDGGGGAAAAALLLLLLLLNNNNNNNNVVVVVVVDDDDDDDDVVVVVVVTTTTTTTEEEEEEEEEFFFFFFFFFFFQQQQQQQQQTTTTTTTNNNNNNNNLLLLLLLLVVVVVVVPPPPPPPYYYYYYYYYYYYPPPPPPPSSSSSSVVVVVVVIIIIIIIIIIIIIIIIRRRRRRRRRRRPPPPPPPSSSSSSTTTTTTTPPPPPPPAAAAAEEEEEEEEEKKKKKKKKKAAAAAYYYYYYYYYYYYHHHHHHHHHHEEEEEEEEEQQQQQQQQQLLLLLLLLSSSSSSVVVVVVVAAAAAEEEEEEEEEIIIIIIIITTTTTTTNNNNNNNNSSSSSSAAAAAFFFFFFFFFFFEEEEEEEEEPPPPPPPAAAAASSSSSSMMMMMMMMMMMMMMMMAAAAAKKKKKKKKKCCCCCCDDDDDDDDPPPPPPPRRRRRRRRRRRHHHHHHHHHHGGGGKKKKKKKKKYYYYYYYYYYYYMMMMMMMMAAAAACCCCCCCCCCCCLLLLLLLLMMMMMMMMYYYYYYYYYYYYRRRRRRRRRRRGGGGDDDDDDDDVVVVVVVVVVVVVVPPPPPPPKKKKKKKKKDDDDDDDDVVVVVVVNNNNNNNNAAAAAAAAAAVVVVVVVAAAAATTTTTTTIIIIIIIIKKKKKKKKKTTTTTTTKKKKKKKKKRRRRRRRRRRRTTTTTTTIIIIIIIIQQQQQQQQQFFFFFFFFFFFVVVVVVVDDDDDDDDWWWWWWWWWWWWWWCCCCCCPPPPPPPTTTTTTTGGGGFFFFFFFFFFFKKKKKKKKKCCCCCCGGGGIIIIIIIINNNNNNNNYYYYYYYYYYYYQQQQQQQQQPPPPPPPPPPPPPPTTTTTTTVVVVVVVVVVVVVVPPPPPPPSSSSSSGGGGDDDDDDDDPPPPPPPAAAAAKKKKKKKKKVVVVVVVMMMMMMMMRRRRRRRRRRRAAAAAVVVVVVVCCCCCCMMMMMMMMIIIIIIIISSSSSSNNNNNNNNSSSSSSTTTTTTTAAAAAIIIIIIIIAAAAAEEEEEEEEEVVVVVVVFFFFFFFFFFFSSSSSSRRRRRRRRRRRIIIIIIIIDDDDDDDDHHHHHHHHHHKKKKKKKKKFFFFFFFFFFFDDDDDDDDLLLLLLLLMMMMMMMMYYYYYYYYYYYYAAAAAKKKKKKKKKRRRRRRRRRRRAAAAAFFFFFFFFFFFVVVVVVVHHHHHHHHHHWWWWWWWWWWWWWWYYYYYYYYYYYYVVVVVVVGGGGEEEEEEEEEGGGGMMMMMMMMEEEEEEEEEEEEEEEEEEGGGGEEEEEEEEEFFFFFFFFFFFSSSSSSEEEEEEEEEVVVVVVVRRRRRRRRRRREEEEEEEEEDDDDDDDDLLLLLLLLAAAAAAAAAALLLLLLLLEEEEEEEEEKKKKKKKKKDDDDDDDDYYYYYYYYYYYYEEEEEEEEEEEEEEEEEEVVVVVVVGGGGIIIIIIIIEEEEEEEEEIIIIIIIIVVVVVVVEEEEEEEEEGGGGEEEEEEEEEGGGGEEEEEEEEEEEEEEEEEEEEEEEEEEEGGGGMMMMMMMMEEEEEEEEEE

SEQ ID NO: 22 - protein, 3481 aa, Volvox carteri
MMMMMMMMRRRRRRRRRRREEEEEEEEEVVVVVVVIIIIIIIISSSSSSIIIIIIIIHHHHHHHHHHIIIIIIIIGGGGQQQQQQQQQAAAAAGGGGIIIIIIIIQQQQQQQQQVVVVVVVGGGGNNNNNNNNAAAAACCCCCCWWWWWWWWWWWWWWEEEEEEEEELLLLLLLLYYYYYYYYYYYYCCCCCCLLLLLLLLEEEEEEEEEHHHHHHHHHHGGGGIIIIIIIIQQQQQQQQQPPPPPPPDDDDDDDDGGGGQQQQQQQQQMMMMMMMMPPPPPPPSSSSSSDDDDDDDDKKKKKKKKKTTTTTTTIIIIIIIIGGGGGGGGGGGGDDDDDDDDDDDDDDDDAAAAAFFFFFFFFFFFNNNNNNNNTTTTTTTFFFFFFFFFFFFFFFFFFFFFFSSSSSSEEEEEEEEETTTTTTTGGGGAAAAAGGGGKKKKKKKKKHHHHHHHHHHVVVVVVVPPPPPPPRRRRRRRRRRRCCCCCCIIIIIIIIFFFFFFFFFFFLLLLLLLLDDDDDDDDLLLLLLLLEEEEEEEEEPPPPPPPTTTTTTTVVVVVVVVVVVVVVDDDDDDDDEEEEEEEEEVVVVVVVRRRRRRRRRRRTTTTTTTGGGGTTTTTTTYYYYYYYYYYYYRRRRRRRRRRRQQQQQQQQQLLLLLLLLFFFFFFFFFFFHHHHHHHHHHPPPPPPPEEEEEEEEEQQQQQQQQQLLLLLLLLIIIIIIIISSSSSSGGGGKKKKKKKKKEEEEEEEEEDDDDDDDDAAAAAAAAAANNNNNNNNNNNNNNNNFFFFFFFFFFFAAAAARRRRRRRRRRRGGGGHHHHHHHHHHYYYYYYYYYYYYTTTTTTTIIIIIIIIGGGGKKKKKKKKKEEEEEEEEEIIIIIIIIVVVVVVVDDDDDDDDLLLLLLLLAAAAALLLLLLLLDDDDDDDDRRRRRRRRRRRIIIIIIIIRRRRRRRRRRRKKKKKKKKKLLLLLLLLAAAAADDDDDDDDNNNNNNNNCCCCCCTTTTTTTGGGGLLLLLLLLQQQQQQQQQGGGGFFFFFFFFFFFLLLLLLLLVVVVVVVFFFFFFFFFFFNNNNNNNNAAAAAVVVVVVVGGGGGGGGGGGGTTTTTTTGGGGSSSSSSGGGGLLLLLLLLGGGGSSSSSSLLLLLLLLLLLLLLLLLLLLLLLLEEEEEEEEERRRRRRRRRRRLLLLLLLLSSSSSSVVVVVVVDDDDDDDDYYYYYYYYYYYYGGGGKKKKKKKKKKKKKKKKKKSSSSSSKKKKKKKKKLLLLLLLLGGGGFFFFFFFFFFFTTTTTTTVVVVVVVYYYYYYYYYYYYPPPPPPPSSSSSSPPPPPPPQQQQQQQQQVVVVVVVSSSSSSTTTTTTTAAAAAVVVVVVVVVVVVVVEEEEEEEEEPPPPPPPYYYYYYYYYYYYNNNNNNNNSSSSSSVVVVVVVLLLLLLLLSSSSSSTTTTTTTHHHHHHHHHHSSSSSSLLLLLLLLLLLLLLLLEEEEEEEEEHHHHHHHHHHTTTTTTTDDDDDDDDVVVVVVVAAAAAVVVVVVVMMMMMMMMLLLLLLLLDDDDDDDDNNNNNNNNEEEEEEEEEAAAAAIIIIIIIIYYYYYYYYYYYYDDDDDDDDIIIIIIIICCCCCCRRRRRRRRRRRRRRRRRRRRRRSSSSSSLLLLLLLLDDDDDDDDIIIIIIIIEEEEEEEEERRRRRRRRRRRPPPPPPPTTTTTTTYYYYYYYYYYYYTTTTTTTNNNNNNNNLLLLLLLLNNNNNNNNRRRRRRRRRRRLLLLLLLLIIIIIIIIAAAAAQQQQQQQQQVVVVVVVIIIIIIIISSSSSSSSSSSSLLLLLLLLTTTTTTTAAAAASSSSSSLLLLLLLLRRRRRRRRRRRFFFFFFFFFFFDDDDDDDDGGGGAAAAALLLLLLLLNNNNNNNNVVVVVVVDDDDDDDDVVVVVVVTTTTTTTEEEEEEEEEFFFFFFFFFFFQQQQQQQQQTTTTTTTNNNNNNNNLLLLLLLLVVVVVVVPPPPPPPYYYYYYYYYYYYPPPPPPPRRRRRRRRRRRIIIIIIIIHHHHHHHHHHFFFFFFFFFFFMMMMMMMMLLLLLLLLSSSSSSSSSSSSYYYYYYYYYYYYAAAAAPPPPPPPIIIIIIIIIIIIIIIISSSSSSAAAAAEEEEEEEEEKKKKKKKKKAAAAAYYYYYYYYYYYYHHHHHHHHHHEEEEEEEEEQQQQQQQQQLLLLLLLLSSSSSSVVVVVVVAAAAAEEEEEEEEEIIIIIIIITTTTTTTNNNNNNNNAAAAAAAAAAFFFFFFFFFFFEEEEEEEEEPPPPPPPAAAAASSSSSSMMMMMMMMMMMMMMMMVVVVVVVKKKKKKKKKCCCCCCDDDDDDDDPPPPPPPRRRRRRRRRRRHHHHHHHHHHGGGGKKKKKKKKKYYYYYYYYYYYYMMMMMMMMAAAAACCCCCCCCCCCCLLLLLLLLMMMMMMMMYYYYYYYYYYYYRRRRRRRRRRRGGGGDDDDDDDDVVVVVVVVVVVVVVPPPPPPPKKKKKKKKKDDDDDDDDVVVVVVVNNNNNNNNAAAAAAAAAAVVVVVVVAAAAATTTTTTTIIIIIIIIKKKKKKKKKTTTTTTTKKKKKKKKKRRRRRRRRRRRTTTTTTTIIIIIIIIQQQQQQQQQFFFFFFFFFFFVVVVVVVDDDDDDDDWWWWWWWWWWWWWWCCCCCCPPPPPPPTTTTTTTGGGGFFFFFFFFFFFKKKKKKKKKCCCCCCGGGGIIIIIIIINNNNNNNNYYYYYYYYYYYYQQQQQQQQQPPPPPPPPPPPPPPTTTTTTTVVVVVVVVVVVVVVPPPPPPPGGGGGGGGDDDDDDDDLLLLLLLLAAAAAKKKKKKKKKVVVVVVVQQQQQQQQQRRRRRRRRRRRAAAAAVVVVVVVCCCCCCMMMMMMMMIIIIIIIISSSSSSNNNNNNNNSSSSSSTTTTTTTAAAAAIIIIIIIIGGGGEEEEEEEEEIIIIIIIIFFFFFFFFFFFSSSSSSRRRRRRRRRRRLLLLLLLLDDDDDDDDHHHHHHHHHHKKKKKKKKKFFFFFFFFFFFDDDDDDDDLLLLLLLLMMMMMMMMYYYYYYYYYYYYAAAAAKKKKKKKKKRRRRRRRRRRRAAAAAFFFFFFFFFFFVVVVVVVHHHHHHHHHHWWWWWWWWWWWWWWYYYYYYYYYYYYVVVVVVVGGGGEEEEEEEEEGGGGMMMMMMMMEEEEEEEEEEEEEEEEEEGGGGEEEEEEEEEFFFFFFFFFFFSSSSSSEEEEEEEEEAAAAARRRRRRRRRRREEEEEEEEEDDDDDDDDLLLLLLLLAAAAAAAAAALLLLLLLLEEEEEEEEEKKKKKKKKKDDDDDDDDFFFFFFFFFFFEEEEEEEEEEEEEEEEEEVVVVVVVGGGGAAAAAEEEEEEEEESSSSSSAAAAAEEEEEEEEEGGGGAAAAAGGGGEEEEEEEEEGGGGEEEEEEEEEGGGGEEEEEEEEEEEEEEEEEEYYYYYYYYYYYYY

SEQ ID NO: 23 - protein, 3503 aa, Saccharomyces cerevisiae
MMMMMMMMRRRRRRRRRRREEEEEEEEEVVVVVVVIIIIIIIISSSSSSIIIIIIIINNNNNNNNVVVVVVVGGGGQQQQQQQQQAAAAAGGGGCCCCCCQQQQQQQQQIIIIIIIIGGGGNNNNNNNNAAAAACCCCCCWWWWWWWWWWWWWWEEEEEEEEELLLLLLLLYYYYYYYYYYYYSSSSSSLLLLLLLLEEEEEEEEEHHHHHHHHHHGGGGIIIIIIIIKKKKKKKKKPPPPPPPDDDDDDDDGGGGHHHHHHHHHHLLLLLLLLEEEEEEEEEDDDDDDDDGGGGLLLLLLLLSSSSSSKKKKKKKKKPPPPPPPKKKKKKKKKGGGGGGGGEEEEEEEEEEEEEEEEEEGGGGFFFFFFFFFFFSSSSSSTTTTTTTFFFFFFFFFFFFFFFFFFFFFFHHHHHHHHHHEEEEEEEEETTTTTTTGGGGYYYYYYYYYYYYGGGGKKKKKKKKKFFFFFFFFFFFVVVVVVVPPPPPPPRRRRRRRRRRRAAAAAIIIIIIIIYYYYYYYYYYYYVVVVVVVDDDDDDDDLLLLLLLLEEEEEEEEEPPPPPPPNNNNNNNNVVVVVVVIIIIIIIIDDDDDDDDEEEEEEEEEVVVVVVVRRRRRRRRRRRNNNNNNNNGGGGPPPPPPPYYYYYYYYYYYYKKKKKKKKKDDDDDDDDLLLLLLLLFFFFFFFFFFFHHHHHHHHHHPPPPPPPEEEEEEEEEQQQQQQQQQLLLLLLLLIIIIIIIISSSSSSGGGGKKKKKKKKKEEEEEEEEEDDDDDDDDAAAAAAAAAANNNNNNNNNNNNNNNNYYYYYYYYYYYYAAAAARRRRRRRRRRRGGGGHHHHHHHHHHYYYYYYYYYYYYTTTTTTTVVVVVVVGGGGRRRRRRRRRRREEEEEEEEEIIIIIIIILLLLLLLLGGGGDDDDDDDDVVVVVVVLLLLLLLLDDDDDDDDRRRRRRRRRRRIIIIIIIIRRRRRRRRRRRKKKKKKKKKLLLLLLLLAAAAADDDDDDDDQQQQQQQQQCCCCCCDDDDDDDDGGGGLLLLLLLLQQQQQQQQQGGGGFFFFFFFFFFFLLLLLLLLFFFFFFFFFFFTTTTTTTHHHHHHHHHHSSSSSSLLLLLLLLGGGGGGGGGGGGTTTTTTTGGGGSSSSSSGGGGLLLLLLLLGGGGSSSSSSLLLLLLLLLLLLLLLLLLLLLLLLEEEEEEEEEEEEEEEEEELLLLLLLLSSSSSSAAAAAEEEEEEEEEYYYYYYYYYYYYGGGGKKKKKKKKKKKKKKKKKKSSSSSSKKKKKKKKKLLLLLLLLEEEEEEEEEFFFFFFFFFFFAAAAAVVVVVVVYYYYYYYYYYYYPPPPPPPAAAAAPPPPPPPQQQQQQQQQVVVVVVVSSSSSSTTTTTTTSSSSSSVVVVVVVVVVVVVVEEEEEEEEEPPPPPPPYYYYYYYYYYYYNNNNNNNNTTTTTTTVVVVVVVLLLLLLLLTTTTTTTTTTTTTTHHHHHHHHHHTTTTTTTTTTTTTTLLLLLLLLEEEEEEEEEHHHHHHHHHHAAAAADDDDDDDDCCCCCCTTTTTTTFFFFFFFFFFFMMMMMMMMVVVVVVVDDDDDDDDNNNNNNNNEEEEEEEEEAAAAAIIIIIIIIYYYYYYYYYYYYDDDDDDDDMMMMMMMMCCCCCCKKKKKKKKKRRRRRRRRRRRNNNNNNNNLLLLLLLLDDDDDDDDIIIIIIIIPPPPPPPRRRRRRRRRRRPPPPPPPSSSSSSFFFFFFFFFFFAAAAANNNNNNNNLLLLLLLLNNNNNNNNNNNNNNNNLLLLLLLLIIIIIIIIAAAAAQQQQQQQQQVVVVVVVVVVVVVVSSSSSSSSSSSSVVVVVVVTTTTTTTAAAAASSSSSSLLLLLLLLRRRRRRRRRRRFFFFFFFFFFFDDDDDDDDGGGGSSSSSSLLLLLLLLNNNNNNNNVVVVVVVDDDDDDDDLLLLLLLLNNNNNNNNEEEEEEEEEFFFFFFFFFFFQQQQQQQQQTTTTTTTNNNNNNNNLLLLLLLLVVVVVVVPPPPPPPYYYYYYYYYYYYPPPPPPPRRRRRRRRRRRIIIIIIIIHHHHHHHHHHFFFFFFFFFFFPPPPPPPLLLLLLLLVVVVVVVSSSSSSYYYYYYYYYYYYSSSSSSPPPPPPPVVVVVVVLLLLLLLLSSSSSSKKKKKKKKKSSSSSSKKKKKKKKKAAAAAFFFFFFFFFFFHHHHHHHHHHEEEEEEEEESSSSSSNNNNNNNNSSSSSSVVVVVVVSSSSSSEEEEEEEEEIIIIIIIITTTTTTTNNNNNNNNAAAAACCCCCCFFFFFFFFFFFEEEEEEEEEPPPPPPPGGGGNNNNNNNNQQQQQQQQQMMMMMMMMVVVVVVVKKKKKKKKKCCCCCCDDDDDDDDPPPPPPPRRRRRRRRRRRDDDDDDDDGGGGKKKKKKKKKYYYYYYYYYYYYMMMMMMMMAAAAATTTTTTTCCCCCCLLLLLLLLLLLLLLLLYYYYYYYYYYYYRRRRRRRRRRRGGGGDDDDDDDDVVVVVVVVVVVVVVTTTTTTTRRRRRRRRRRRDDDDDDDDVVVVVVVQQQQQQQQQRRRRRRRRRRRAAAAAVVVVVVVEEEEEEEEEQQQQQQQQQVVVVVVVKKKKKKKKKNNNNNNNNKKKKKKKKKKKKKKKKKKTTTTTTTVVVVVVVQQQQQQQQQLLLLLLLLVVVVVVVDDDDDDDDWWWWWWWWWWWWWWCCCCCCPPPPPPPTTTTTTTGGGGFFFFFFFFFFFKKKKKKKKKIIIIIIIIGGGGIIIIIIIICCCCCCYYYYYYYYYYYYEEEEEEEEEPPPPPPPPPPPPPPTTTTTTTAAAAATTTTTTTPPPPPPPNNNNNNNNSSSSSSQQQQQQQQQLLLLLLLLAAAAATTTTTTTVVVVVVVDDDDDDDDRRRRRRRRRRRAAAAAVVVVVVVCCCCCCMMMMMMMMLLLLLLLLSSSSSSNNNNNNNNTTTTTTTTTTTTTTSSSSSSIIIIIIIIAAAAAEEEEEEEEEAAAAAWWWWWWWWWWWWWWKKKKKKKKKRRRRRRRRRRRIIIIIIIIDDDDDDDDRRRRRRRRRRRKKKKKKKKKFFFFFFFFFFFDDDDDDDDLLLLLLLLMMMMMMMMYYYYYYYYYYYYAAAAAKKKKKKKKKRRRRRRRRRRRAAAAAFFFFFFFFFFFVVVVVVVHHHHHHHHHHWWWWWWWWWWWWWWYYYYYYYYYYYYVVVVVVVGGGGEEEEEEEEEGGGGMMMMMMMMEEEEEEEEEEEEEEEEEEGGGGEEEEEEEEEFFFFFFFFFFFTTTTTTTEEEEEEEEEAAAAARRRRRRRRRRREEEEEEEEEDDDDDDDDLLLLLLLLAAAAAAAAAALLLLLLLLEEEEEEEEERRRRRRRRRRRDDDDDDDDYYYYYYYYYYYYIIIIIIIIEEEEEEEEEVVVVVVVGGGGAAAAADDDDDDDDSSSSSSYYYYYYYYYYYYAAAAAEEEEEEEEEEEEEEEEEEEEEEEEEEEEEEEEEEEEFFFFFFFFFFFF

SEQ ID NO: 24 - protein, 2823 aa, Anemia phyllitidis
LLLLLLLLFFFFFFFFFFFHHHHHHHHHHPPPPPPPEEEEEEEEEQQQQQQQQQLLLLLLLLIIIIIIIISSSSSSGGGGKKKKKKKKKEEEEEEEEEDDDDDDDDAAAAAAAAAANNNNNNNNNNNNNNNNFFFFFFFFFFFAAAAARRRRRRRRRRRGGGGHHHHHHHHHHYYYYYYYYYYYYTTTTTTTVVVVVVVGGGGKKKKKKKKKEEEEEEEEEIIIIIIIIVVVVVVVDDDDDDDDLLLLLLLLCCCCCCLLLLLLLLDDDDDDDDRRRRRRRRRRRVVVVVVVRRRRRRRRRRRKKKKKKKKKLLLLLLLLSSSSSSDDDDDDDDNNNNNNNNCCCCCCTTTTTTTGGGGLLLLLLLLQQQQQQQQQGGGGFFFFFFFFFFFLLLLLLLLVVVVVVVFFFFFFFFFFFNNNNNNNNAAAAAVVVVVVVGGGGGGGGGGGGTTTTTTTGGGGSSSSSSGGGGLLLLLLLLGGGGSSSSSSLLLLLLLLLLLLLLLLLLLLLLLLEEEEEEEEERRRRRRRRRRRLLLLLLLLSSSSSSVVVVVVVDDDDDDDDYYYYYYYYYYYYGGGGKKKKKKKKKKKKKKKKKKSSSSSSKKKKKKKKKLLLLLLLLGGGGFFFFFFFFFFFTTTTTTTIIIIIIIIYYYYYYYYYYYYPPPPPPPSSSSSSPPPPPPPQQQQQQQQQVVVVVVVSSSSSSTTTTTTTAAAAAVVVVVVVVVVVVVVEEEEEEEEEPPPPPPPYYYYYYYYYYYYNNNNNNNNSSSSSSVVVVVVVLLLLLLLLSSSSSSTTTTTTTHHHHHHHHHHSSSSSSLLLLLLLLLLLLLLLLEEEEEEEEEHHHHHHHHHHTTTTTTTDDDDDDDDVVVVVVVAAAAAVVVVVVVLLLLLLLLLLLLLLLLDDDDDDDDNNNNNNNNEEEEEEEEEAAAAAIIIIIIIIYYYYYYYYYYYYDDDDDDDDIIIIIIIICCCCCCRRRRRRRRRRRRRRRRRRRRRRSSSSSSLLLLLLLLLLLLLLLLDDDDDDDDIIIIIIIIEEEEEEEEERRRRRRRRRRRPPPPPPPTTTTTTTYYYYYYYYYYYYTTTTTTTNNNNNNNNLLLLLLLLNNNNNNNNRRRRRRRRRRRLLLLLLLLVVVVVVVSSSSSSQQQQQQQQQIIIIIIIIIIIIIIIISSSSSSSSSSSSLLLLLLLLTTTTTTTTTTTTTTSSSSSSLLLLLLLLRRRRRRRRRRRFFFFFFFFFFFDDDDDDDDGGGGAAAAALLLLLLLLNNNNNNNNVVVVVVVDDDDDDDDVVVVVVVTTTTTTTEEEEEEEEEFFFFFFFFFFFQQQQQQQQQTTTTTTTNNNNNNNNLLLLLLLLVVVVVVVPPPPPPPYYYYYYYYYYYYPPPPPPPRRRRRRRRRRRIIIIIIIIHHHHHHHHHHFFFFFFFFFFFMMMMMMMMLLLLLLLLSSSSSSSSSSSSYYYYYYYYYYYYAAAAAPPPPPPPVVVVVVVIIIIIIIISSSSSSAAAAAAAAAAKKKKKKKKKAAAAAYYYYYYYYYYYYHHHHHHHHHHEEEEEEEEEQQQQQQQQQLLLLLLLLSSSSSSVVVVVVVPPPPPPPEEEEEEEEEIIIIIIIITTTTTTTNNNNNNNNAAAAAVVVVVVVFFFFFFFFFFFEEEEEEEEEPPPPPPPSSSSSSSSSSSSMMMMMMMMMMMMMMMMAAAAAKKKKKKKKKCCCCCCDDDDDDDDPPPPPPPRRRRRRRRRRRHHHHHHHHHHGGGGKKKKKKKKKYYYYYYYYYYYYMMMMMMMMAAAAACCCCCCCCCCCCLLLLLLLLMMMMMMMMYYYYYYYYYYYYRRRRRRRRRRRGGGGDDDDDDDDVVVVVVVVVVVVVVPPPPPPPKKKKKKKKKDDDDDDDDVVVVVVVNNNNNNNNAAAAAAAAAAVVVVVVVAAAAATTTTTTTIIIIIIIIKKKKKKKKKTTTTTTTKKKKKKKKKRRRRRRRRRRRTTTTTTTVVVVVVVQQQQQQQQQFFFFFFFFFFFVVVVVVVDDDDDDDDWWWWWWWWWWWWWWCCCCCCPPPPPPPTTTTTTTGGGGFFFFFFFFFFFKKKKKKKKKCCCCCCGGGGIIIIIIIINNNNNNNNYYYYYYYYYYYYQQQQQQQQQPPPPPPPPPPPPPPSSSSSSVVVVVVVVVVVVVVPPPPPPPGGGGGGGGDDDDDDDDLLLLLLLLAAAAAKKKKKKKKKVVVVVVVQQQQQQQQQRRRRRRRRRRRAAAAAVVVVVVVCCCCCCMMMMMMMMIIIIIIIISSSSSSNNNNNNNNNNNNNNNNTTTTTTTAAAAAVVVVVVVAAAAAEEEEEEEEEVVVVVVVFFFFFFFFFFFSSSSSSRRRRRRRRRRRIIIIIIIIDDDDDDDDHHHHHHHHHHKKKKKKKKKFFFFFFFFFFFDDDDDDDDLLLLLLLLMMMMMMMMYYYYYYYYYYYYAAAAAKKKKKKKKKLLLLLLLLAAAAAFFFFFFFFFFFVVVVVVVHHHHHHHHHHWWWWWWWWWWWWWWYYYYYYYYYYYYVVVVVVVGGGGEEEEEEEEEGGGGMMMMMMMMEEEEEEEEEEEEEEEEEEGGGGEEEEEEEEEFFFFFFFFFFFSSSSSSEEEEEEEEEAAAAARRRRRRRRRRREEEEEEEEEDDDDDDDDLLLLLLLLAAAAAAAAAALLLLLLLLEEEEEEEEEKKKKKKKKKDDDDDDDDYYYYYYYYYYYYEEEEEEEEEEEEEEEEEEVVVVVVVAAAAAAAAAAEEEEEEEEEGGGGVVVVVVVDDDDDDDDEEEEEEEEEPPPPPPPEEEEEEEEEGGGGDDDDDDDDDDDDDDDDYYYYYYYYYYYYY

SEQ ID NO: 25 - protein, 3479 aa, Arabidopsis thaliana
MMMMMMMMRRRRRRRRRRREEEEEEEEECCCCCCIIIIIIIISSSSSSIIIIIIIIHHHHHHHHHHIIIIIIIIGGGGQQQQQQQQQAAAAAGGGGIIIIIIIIQQQQQQQQQVVVVVVVGGGGNNNNNNNNAAAAACCCCCCWWWWWWWWWWWWWWEEEEEEEEELLLLLLLLYYYYYYYYYYYYCCCCCCLLLLLLLLEEEEEEEEEHHHHHHHHHHGGGGIIIIIIIIQQQQQQQQQPPPPPPPDDDDDDDDGGGGQQQQQQQQQMMMMMMMMPPPPPPPSSSSSSDDDDDDDDKKKKKKKKKTTTTTTTVVVVVVVGGGGGGGGGGGGDDDDDDDDDDDDDDDDAAAAAFFFFFFFFFFFNNNNNNNNTTTTTTTFFFFFFFFFFFFFFFFFFFFFFSSSSSSEEEEEEEEETTTTTTTGGGGAAAAAGGGGKKKKKKKKKHHHHHHHHHHVVVVVVVPPPPPPPRRRRRRRRRRRAAAAAVVVVVVVFFFFFFFFFFFVVVVVVVDDDDDDDDLLLLLLLLEEEEEEEEEPPPPPPPTTTTTTTVVVVVVVIIIIIIIIDDDDDDDDEEEEEEEEEVVVVVVVRRRRRRRRRRRTTTTTTTGGGGTTTTTTTYYYYYYYYYYYYRRRRRRRRRRRQQQQQQQQQLLLLLLLLFFFFFFFFFFFHHHHHHHHHHPPPPPPPEEEEEEEEEQQQQQQQQQLLLLLLLLIIIIIIIISSSSSSGGGGKKKKKKKKKEEEEEEEEEDDDDDDDDAAAAAAAAAANNNNNNNNNNNNNNNNFFFFFFFFFFFAAAAARRRRRRRRRRRGGGGHHHHHHHHHHYYYYYYYYYYYYTTTTTTTIIIIIIIIGGGGKKKKKKKKKEEEEEEEEEIIIIIIIIVVVVVVVDDDDDDDDLLLLLLLLCCCCCCLLLLLLLLDDDDDDDDRRRRRRRRRRRIIIIIIIIRRRRRRRRRRRKKKKKKKKKLLLLLLLLAAAAADDDDDDDDNNNNNNNNCCCCCCTTTTTTTGGGGLLLLLLLLQQQQQQQQQGGGGFFFFFFFFFFFLLLLLLLLVVVVVVVFFFFFFFFFFFNNNNNNNNAAAAAVVVVVVVGGGGGGGGGGGGTTTTTTTGGGGSSSSSSGGGGLLLLLLLLGGGGSSSSSSLLLLLLLLLLLLLLLLLLLLLLLLEEEEEEEEERRRRRRRRRRRLLLLLLLLSSSSSSVVVVVVVDDDDDDDDYYYYYYYYYYYYGGGGKKKKKKKKKKKKKKKKKKSSSSSSKKKKKKKKKLLLLLLLLGGGGFFFFFFFFFFFTTTTTTTVVVVVVVYYYYYYYYYYYYPPPPPPPSSSSSSPPPPPPPQQQQQQQQQVVVVVVVSSSSSSTTTTTTTSSSSSSVVVVVVVVVVVVVVEEEEEEEEEPPPPPPPYYYYYYYYYYYYNNNNNNNNSSSSSSVVVVVVVLLLLLLLLSSSSSSTTTTTTTHHHHHHHHHHSSSSSSLLLLLLLLLLLLLLLLEEEEEEEEEHHHHHHHHHHTTTTTTTDDDDDDDDVVVVVVVSSSSSSIIIIIIIILLLLLLLLLLLLLLLLDDDDDDDDNNNNNNNNEEEEEEEEEAAAAAIIIIIIIIYYYYYYYYYYYYDDDDDDDDIIIIIIIICCCCCCRRRRRRRRRRRRRRRRRRRRRRSSSSSSLLLLLLLLSSSSSSIIIIIIIIEEEEEEEEERRRRRRRRRRRPPPPPPPTTTTTTTYYYYYYYYYYYYTTTTTTTNNNNNNNNLLLLLLLLNNNNNNNNRRRRRRRRRRRLLLLLLLLVVVVVVVSSSSSSQQQQQQQQQVVVVVVVIIIIIIIISSSSSSSSSSSSLLLLLLLLTTTTTTTAAAAASSSSSSLLLLLLLLRRRRRRRRRRRFFFFFFFFFFFDDDDDDDDGGGGAAAAALLLLLLLLNNNNNNNNVVVVVVVDDDDDDDDVVVVVVVTTTTTTTEEEEEEEEEFFFFFFFFFFFQQQQQQQQQTTTTTTTNNNNNNNNLLLLLLLLVVVVVVVPPPPPPPYYYYYYYYYYYYPPPPPPPRRRRRRRRRRRIIIIIIIIHHHHHHHHHHFFFFFFFFFFFMMMMMMMMLLLLLLLLSSSSSSSSSSSSYYYYYYYYYYYYAAAAAPPPPPPPVVVVVVVIIIIIIIISSSSSSAAAAAEEEEEEEEEKKKKKKKKKAAAAAFFFFFFFFFFFHHHHHHHHHHEEEEEEEEEQQQQQQQQQLLLLLLLLSSSSSSVVVVVVVAAAAAEEEEEEEEEIIIIIIIITTTTTTTNNNNNNNNSSSSSSAAAAAFFFFFFFFFFFEEEEEEEEEPPPPPPPAAAAASSSSSSMMMMMMMMMMMMMMMMAAAAAKKKKKKKKKCCCCCCDDDDDDDDPPPPPPPRRRRRRRRRRRHHHHHHHHHHGGGGKKKKKKKKKYYYYYYYYYYYYMMMMMMMMAAAAACCCCCCCCCCCCLLLLLLLLMMMMMMMMYYYYYYYYYYYYRRRRRRRRRRRGGGGDDDDDDDDVVVVVVVVVVVVVVPPPPPPPKKKKKKKKKDDDDDDDDVVVVVVVNNNNNNNNAAAAAAAAAAVVVVVVVGGGGTTTTTTTIIIIIIIIKKKKKKKKKTTTTTTTKKKKKKKKKRRRRRRRRRRRTTTTTTTIIIIIIIIQQQQQQQQQFFFFFFFFFFFVVVVVVVDDDDDDDDWWWWWWWWWWWWWWCCCCCCPPPPPPPTTTTTTTGGGGFFFFFFFFFFFKKKKKKKKKCCCCCCGGGGIIIIIIIINNNNNNNNYYYYYYYYYYYYQQQQQQQQQPPPPPPPPPPPPPPTTTTTTTVVVVVVVVVVVVVVPPPPPPPGGGGGGGGDDDDDDDDLLLLLLLLAAAAAKKKKKKKKKVVVVVVVQQQQQQQQQRRRRRRRRRRRAAAAAVVVVVVVCCCCCCMMMMMMMMIIIIIIIISSSSSSNNNNNNNNSSSSSSTTTTTTTSSSSSSVVVVVVVAAAAAEEEEEEEEEVVVVVVVFFFFFFFFFFFSSSSSSRRRRRRRRRRRIIIIIIIIDDDDDDDDHHHHHHHHHHKKKKKKKKKFFFFFFFFFFFDDDDDDDDLLLLLLLLMMMMMMMMYYYYYYYYYYYYAAAAAKKKKKKKKKRRRRRRRRRRRAAAAAFFFFFFFFFFFVVVVVVVHHHHHHHHHHWWWWWWWWWWWWWWYYYYYYYYYYYYVVVVVVVGGGGEEEEEEEEEGGGGMMMMMMMMEEEEEEEEEEEEEEEEEEGGGGEEEEEEEEEFFFFFFFFFFFSSSSSSEEEEEEEEEAAAAARRRRRRRRRRREEEEEEEEEDDDDDDDDLLLLLLLLAAAAAAAAAALLLLLLLLEEEEEEEEEKKKKKKKKKDDDDDDDDYYYYYYYYYYYYEEEEEEEEEEEEEEEEEEVVVVVVVGGGGAAAAAEEEEEEEEEGGGGGGGGDDDDDDDDDDDDDDDDEEEEEEEEEDDDDDDDDDDDDDDDDEEEEEEEEEGGGGEEEEEEEEEEEEEEEEEEYYYYYYYYYYYYY

SEQ ID NO: 26 - protein, 3511 aa, Caenorhabditis elegans
MMMMMMMMRRRRRRRRRRREEEEEEEEEVVVVVVVIIIIIIIISSSSSSIIIIIIIIHHHHHHHHHHVVVVVVVGGGGQQQQQQQQQAAAAAGGGGVVVVVVVQQQQQQQQQIIIIIIIIGGGGNNNNNNNNAAAAACCCCCCWWWWWWWWWWWWWWEEEEEEEEELLLLLLLLYYYYYYYYYYYYCCCCCCLLLLLLLLEEEEEEEEEHHHHHHHHHHGGGGIIIIIIIIQQQQQQQQQPPPPPPPDDDDDDDDGGGGTTTTTTTMMMMMMMMPPPPPPPTTTTTTTQQQQQQQQQSSSSSSTTTTTTTNNNNNNNNEEEEEEEEEGGGGEEEEEEEEESSSSSSFFFFFFFFFFFTTTTTTTTTTTTTTFFFFFFFFFFFFFFFFFFFFFFSSSSSSDDDDDDDDTTTTTTTGGGGSSSSSSGGGGRRRRRRRRRRRYYYYYYYYYYYYVVVVVVVPPPPPPPRRRRRRRRRRRSSSSSSIIIIIIIIFFFFFFFFFFFVVVVVVVDDDDDDDDLLLLLLLLEEEEEEEEEPPPPPPPTTTTTTTVVVVVVVVVVVVVVDDDDDDDDEEEEEEEEEIIIIIIIIRRRRRRRRRRRTTTTTTTGGGGTTTTTTTYYYYYYYYYYYYKKKKKKKKKKKKKKKKKKLLLLLLLLFFFFFFFFFFFHHHHHHHHHHPPPPPPPEEEEEEEEEQQQQQQQQQMMMMMMMMIIIIIIIITTTTTTTGGGGKKKKKKKKKEEEEEEEEEDDDDDDDDAAAAAAAAAANNNNNNNNNNNNNNNNYYYYYYYYYYYYAAAAARRRRRRRRRRRGGGGHHHHHHHHHHYYYYYYYYYYYYTTTTTTTVVVVVVVGGGGKKKKKKKKKEEEEEEEEELLLLLLLLIIIIIIIIDDDDDDDDTTTTTTTVVVVVVVLLLLLLLLDDDDDDDDRRRRRRRRRRRIIIIIIIIRRRRRRRRRRRRRRRRRRRRRRLLLLLLLLAAAAADDDDDDDDNNNNNNNNCCCCCCSSSSSSGGGGLLLLLLLLQQQQQQQQQGGGGFFFFFFFFFFFFFFFFFFFFFFVVVVVVVFFFFFFFFFFFHHHHHHHHHHSSSSSSFFFFFFFFFFFGGGGGGGGGGGGTTTTTTTGGGGSSSSSSGGGGFFFFFFFFFFFTTTTTTTSSSSSSLLLLLLLLLLLLLLLLMMMMMMMMEEEEEEEEERRRRRRRRRRRLLLLLLLLSSSSSSVVVVVVVDDDDDDDDYYYYYYYYYYYYGGGGKKKKKKKKKKKKKKKKKKSSSSSSKKKKKKKKKLLLLLLLLEEEEEEEEEFFFFFFFFFFFSSSSSSIIIIIIIIYYYYYYYYYYYYPPPPPPPAAAAAPPPPPPPQQQQQQQQQVVVVVVVSSSSSSTTTTTTTAAAAAVVVVVVVVVVVVVVEEEEEEEEEPPPPPPPYYYYYYYYYYYYNNNNNNNNSSSSSSIIIIIIIILLLLLLLLTTTTTTTTTTTTTTHHHHHHHHHHTTTTTTTTTTTTTTLLLLLLLLEEEEEEEEEHHHHHHHHHHSSSSSSDDDDDDDDCCCCCCAAAAAFFFFFFFFFFFMMMMMMMMVVVVVVVDDDDDDDDNNNNNNNNEEEEEEEEEAAAAAIIIIIIIIYYYYYYYYYYYYDDDDDDDDIIIIIIIICCCCCCRRRRRRRRRRRRRRRRRRRRRRNNNNNNNNLLLLLLLLDDDDDDDDVVVVVVVEEEEEEEEERRRRRRRRRRRPPPPPPPSSSSSSYYYYYYYYYYYYTTTTTTTNNNNNNNNLLLLLLLLNNNNNNNNRRRRRRRRRRRIIIIIIIIIIIIIIIISSSSSSQQQQQQQQQVVVVVVVVVVVVVVSSSSSSSSSSSSIIIIIIIITTTTTTTAAAAASSSSSSLLLLLLLLRRRRRRRRRRRFFFFFFFFFFFDDDDDDDDGGGGAAAAALLLLLLLLNNNNNNNNVVVVVVVDDDDDDDDLLLLLLLLNNNNNNNNEEEEEEEEEFFFFFFFFFFFQQQQQQQQQTTTTTTTNNNNNNNNLLLLLLLLVVVVVVVPPPPPPPYYYYYYYYYYYYPPPPPPPRRRRRRRRRRRIIIIIIIIHHHHHHHHHHFFFFFFFFFFFPPPPPPPLLLLLLLLAAAAAAAAAAYYYYYYYYYYYYTTTTTTTPPPPPPPLLLLLLLLIIIIIIIISSSSSSAAAAAEEEEEEEEEKKKKKKKKKAAAAAYYYYYYYYYYYYHHHHHHHHHHEEEEEEEEEAAAAALLLLLLLLSSSSSSVVVVVVVSSSSSSDDDDDDDDIIIIIIIITTTTTTTNNNNNNNNSSSSSSCCCCCCFFFFFFFFFFFEEEEEEEEEPPPPPPPAAAAANNNNNNNNQQQQQQQQQMMMMMMMMVVVVVVVKKKKKKKKKCCCCCCDDDDDDDDPPPPPPPRRRRRRRRRRRHHHHHHHHHHGGGGKKKKKKKKKYYYYYYYYYYYYMMMMMMMMAAAAAVVVVVVVCCCCCCLLLLLLLLLLLLLLLLYYYYYYYYYYYYRRRRRRRRRRRGGGGDDDDDDDDVVVVVVVVVVVVVVPPPPPPPKKKKKKKKKDDDDDDDDVVVVVVVNNNNNNNNTTTTTTTAAAAAIIIIIIIIAAAAAAAAAAIIIIIIIIKKKKKKKKKTTTTTTTKKKKKKKKKRRRRRRRRRRRTTTTTTTIIIIIIIIQQQQQQQQQFFFFFFFFFFFVVVVVVVDDDDDDDDWWWWWWWWWWWWWWCCCCCCPPPPPPPTTTTTTTGGGGFFFFFFFFFFFKKKKKKKKKVVVVVVVGGGGIIIIIIIINNNNNNNNYYYYYYYYYYYYQQQQQQQQQPPPPPPPPPPPPPPTTTTTTTVVVVVVVVVVVVVVPPPPPPPGGGGGGGGDDDDDDDDLLLLLLLLAAAAAKKKKKKKKKVVVVVVVPPPPPPPRRRRRRRRRRRAAAAAVVVVVVVCCCCCCMMMMMMMMLLLLLLLLSSSSSSNNNNNNNNTTTTTTTTTTTTTTAAAAAIIIIIIIIAAAAAEEEEEEEEEAAAAAWWWWWWWWWWWWWWSSSSSSRRRRRRRRRRRLLLLLLLLDDDDDDDDYYYYYYYYYYYYKKKKKKKKKFFFFFFFFFFFDDDDDDDDLLLLLLLLMMMMMMMMYYYYYYYYYYYYAAAAAKKKKKKKKKRRRRRRRRRRRAAAAAFFFFFFFFFFFVVVVVVVHHHHHHHHHHWWWWWWWWWWWWWWYYYYYYYYYYYYVVVVVVVGGGGEEEEEEEEEGGGGMMMMMMMMEEEEEEEEEEEEEEEEEEGGGGEEEEEEEEEFFFFFFFFFFFTTTTTTTEEEEEEEEEAAAAARRRRRRRRRRREEEEEEEEEDDDDDDDDLLLLLLLLAAAAAAAAAALLLLLLLLEEEEEEEEEKKKKKKKKKDDDDDDDDYYYYYYYYYYYYEEEEEEEEEEEEEEEEEEVVVVVVVGGGGAAAAADDDDDDDDSSSSSSNNNNNNNNEEEEEEEEEGGGGGGGGEEEEEEEEEEEEEEEEEEEEEEEEEEEGGGGEEEEEEEEEEEEEEEEEEYYYYYYYYYYYYY

SEQ ID NO: 27 - protein, 3498 aa, Gallus gallus
MMMMMMMMRRRRRRRRRRREEEEEEEEECCCCCCIIIIIIIISSSSSSVVVVVVVHHHHHHHHHHIIIIIIIIGGGGQQQQQQQQQAAAAAGGGGVVVVVVVQQQQQQQQQIIIIIIIIGGGGNNNNNNNNAAAAACCCCCCWWWWWWWWWWWWWWEEEEEEEEELLLLLLLLFFFFFFFFFFFCCCCCCLLLLLLLLEEEEEEEEEHHHHHHHHHHSSSSSSIIIIIIIIQQQQQQQQQPPPPPPPDDDDDDDDGGGGTTTTTTTFFFFFFFFFFFSSSSSSDDDDDDDDPPPPPPPPPPPPPPSSSSSSSSSSSSDDDDDDDDDDDDDDDDSSSSSSFFFFFFFFFFFAAAAATTTTTTTFFFFFFFFFFFFFFFFFFFFFFRRRRRRRRRRREEEEEEEEETTTTTTTSSSSSSMMMMMMMMSSSSSSKKKKKKKKKYYYYYYYYYYYYVVVVVVVPPPPPPPRRRRRRRRRRRAAAAAIIIIIIIIMMMMMMMMVVVVVVVDDDDDDDDLLLLLLLLEEEEEEEEEPPPPPPPTTTTTTTVVVVVVVVVVVVVVDDDDDDDDEEEEEEEEEVVVVVVVRRRRRRRRRRRTTTTTTTGGGGTTTTTTTYYYYYYYYYYYYRRRRRRRRRRRHHHHHHHHHHLLLLLLLLFFFFFFFFFFFHHHHHHHHHHPPPPPPPEEEEEEEEEQQQQQQQQQLLLLLLLLIIIIIIIITTTTTTTGGGGKKKKKKKKKEEEEEEEEEDDDDDDDDAAAAAAAAAANNNNNNNNNNNNNNNNYYYYYYYYYYYYAAAAARRRRRRRRRRRGGGGHHHHHHHHHHYYYYYYYYYYYYTTTTTTTVVVVVVVGGGGKKKKKKKKKDDDDDDDDKKKKKKKKKVVVVVVVDDDDDDDDMMMMMMMMVVVVVVVSSSSSSDDDDDDDDRRRRRRRRRRRIIIIIIIIRRRRRRRRRRRKKKKKKKKKLLLLLLLLAAAAADDDDDDDDSSSSSSCCCCCCSSSSSSGGGGLLLLLLLLQQQQQQQQQGGGGFFFFFFFFFFFLLLLLLLLIIIIIIIIFFFFFFFFFFFHHHHHHHHHHSSSSSSFFFFFFFFFFFGGGGGGGGGGGGTTTTTTTGGGGSSSSSSGGGGFFFFFFFFFFFTTTTTTTSSSSSSLLLLLLLLLLLLLLLLMMMMMMMMEEEEEEEEERRRRRRRRRRRLLLLLLLLSSSSSSVVVVVVVEEEEEEEEEYYYYYYYYYYYYGGGGKKKKKKKKKKKKKKKKKKSSSSSSKKKKKKKKKLLLLLLLLEEEEEEEEEFFFFFFFFFFFAAAAAIIIIIIIIYYYYYYYYYYYYPPPPPPPAAAAAPPPPPPPQQQQQQQQQAAAAASSSSSSSSSSSSAAAAAVVVVVVVVVVVVVVEEEEEEEEEPPPPPPPYYYYYYYYYYYYNNNNNNNNSSSSSSVVVVVVVLLLLLLLLTTTTTTTTTTTTTTHHHHHHHHHHTTTTTTTTTTTTTTLLLLLLLLEEEEEEEEEHHHHHHHHHHSSSSSSDDDDDDDDCCCCCCVVVVVVVFFFFFFFFFFFMMMMMMMMVVVVVVVDDDDDDDDNNNNNNNNEEEEEEEEEAAAAAIIIIIIIIYYYYYYYYYYYYDDDDDDDDIIIIIIIICCCCCCHHHHHHHHHHRRRRRRRRRRRNNNNNNNNLLLLLLLLDDDDDDDDIIIIIIIIEEEEEEEEERRRRRRRRRRRPPPPPPPTTTTTTTYYYYYYYYYYYYTTTTTTTNNNNNNNNLLLLLLLLNNNNNNNNRRRRRRRRRRRLLLLLLLLIIIIIIIISSSSSSQQQQQQQQQIIIIIIIIVVVVVVVSSSSSSSSSSSSIIIIIIIITTTTTTTAAAAASSSSSSLLLLLLLLRRRRRRRRRRRFFFFFFFFFFFDDDDDDDDGGGGAAAAALLLLLLLLNNNNNNNNVVVVVVVDDDDDDDDLLLLLLLLTTTTTTTEEEEEEEEEFFFFFFFFFFFQQQQQQQQQTTTTTTTNNNNNNNNLLLLLLLLVVVVVVVPPPPPPPFFFFFFFFFFFPPPPPPPRRRRRRRRRRRIIIIIIIIHHHHHHHHHHFFFFFFFFFFFPPPPPPPLLLLLLLLVVVVVVVTTTTTTTYYYYYYYYYYYYAAAAAPPPPPPPIIIIIIIIIIIIIIIISSSSSSSSSSSSDDDDDDDDRRRRRRRRRRRAAAAAYYYYYYYYYYYYHHHHHHHHHHEEEEEEEEEQQQQQQQQQLLLLLLLLSSSSSSVVVVVVVAAAAAEEEEEEEEEIIIIIIIITTTTTTTSSSSSSSSSSSSCCCCCCFFFFFFFFFFFEEEEEEEEEPPPPPPPNNNNNNNNNNNNNNNNQQQQQQQQQMMMMMMMMVVVVVVVKKKKKKKKKCCCCCCDDDDDDDDPPPPPPPQQQQQQQQQQQQQQQQQQGGGGKKKKKKKKKYYYYYYYYYYYYMMMMMMMMAAAAACCCCCCCCCCCCMMMMMMMMLLLLLLLLYYYYYYYYYYYYRRRRRRRRRRRGGGGDDDDDDDDVVVVVVVVVVVVVVPPPPPPPKKKKKKKKKDDDDDDDDVVVVVVVNNNNNNNNVVVVVVVAAAAAIIIIIIIIAAAAAAAAAAIIIIIIIIKKKKKKKKKTTTTTTTNNNNNNNNRRRRRRRRRRRSSSSSSLLLLLLLLQQQQQQQQQFFFFFFFFFFFVVVVVVVDDDDDDDDWWWWWWWWWWWWWWCCCCCCPPPPPPPTTTTTTTGGGGFFFFFFFFFFFKKKKKKKKKVVVVVVVGGGGIIIIIIIINNNNNNNNYYYYYYYYYYYYQQQQQQQQQPPPPPPPPPPPPPPIIIIIIIIPPPPPPPTTTTTTTPPPPPPPGGGGGGGGDDDDDDDDLLLLLLLLAAAAAQQQQQQQQQVVVVVVVQQQQQQQQQRRRRRRRRRRRAAAAAVVVVVVVCCCCCCMMMMMMMMLLLLLLLLSSSSSSNNNNNNNNTTTTTTTTTTTTTTAAAAAIIIIIIIIAAAAAEEEEEEEEEAAAAAWWWWWWWWWWWWWWAAAAARRRRRRRRRRRLLLLLLLLDDDDDDDDHHHHHHHHHHKKKKKKKKKFFFFFFFFFFFDDDDDDDDLLLLLLLLMMMMMMMMYYYYYYYYYYYYAAAAAKKKKKKKKKRRRRRRRRRRRAAAAAFFFFFFFFFFFVVVVVVVHHHHHHHHHHWWWWWWWWWWWWWWYYYYYYYYYYYYVVVVVVVSSSSSSEEEEEEEEEGGGGMMMMMMMMEEEEEEEEEEEEEEEEEEGGGGEEEEEEEEEFFFFFFFFFFFAAAAAEEEEEEEEEAAAAARRRRRRRRRRREEEEEEEEEDDDDDDDDLLLLLLLLAAAAAAAAAALLLLLLLLEEEEEEEEEKKKKKKKKKDDDDDDDDYYYYYYYYYYYYDDDDDDDDEEEEEEEEEVVVVVVVAAAAATTTTTTTDDDDDDDDLLLLLLLLFFFFFFFFFFFEEEEEEEEEDDDDDDDDEEEEEEEEENNNNNNNNEEEEEEEEEAAAAAGGGGDDDDDDDDSSSSSSS

SEQ ID NO: 28 - protein, 3483 aa, Chlamydomonas reinhardtii
MMMMMMMMRRRRRRRRRRREEEEEEEEEVVVVVVVIIIIIIIISSSSSSIIIIIIIIHHHHHHHHHHIIIIIIIIGGGGQQQQQQQQQAAAAAGGGGIIIIIIIIQQQQQQQQQVVVVVVVGGGGNNNNNNNNAAAAACCCCCCWWWWWWWWWWWWWWEEEEEEEEELLLLLLLLYYYYYYYYYYYYCCCCCCLLLLLLLLEEEEEEEEEHHHHHHHHHHGGGGIIIIIIIIQQQQQQQQQPPPPPPPDDDDDDDDGGGGQQQQQQQQQMMMMMMMMPPPPPPPSSSSSSDDDDDDDDKKKKKKKKKTTTTTTTIIIIIIIIGGGGGGGGGGGGDDDDDDDDDDDDDDDDAAAAAFFFFFFFFFFFNNNNNNNNTTTTTTTFFFFFFFFFFFFFFFFFFFFFFSSSSSSEEEEEEEEETTTTTTTGGGGAAAAAGGGGKKKKKKKKKHHHHHHHHHHVVVVVVVPPPPPPPRRRRRRRRRRRCCCCCCIIIIIIIIFFFFFFFFFFFLLLLLLLLDDDDDDDDLLLLLLLLEEEEEEEEEPPPPPPPTTTTTTTVVVVVVVVVVVVVVDDDDDDDDEEEEEEEEEVVVVVVVRRRRRRRRRRRTTTTTTTGGGGTTTTTTTYYYYYYYYYYYYRRRRRRRRRRRQQQQQQQQQLLLLLLLLFFFFFFFFFFFHHHHHHHHHHPPPPPPPEEEEEEEEEQQQQQQQQQLLLLLLLLIIIIIIIISSSSSSGGGGKKKKKKKKKEEEEEEEEEDDDDDDDDAAAAAAAAAANNNNNNNNNNNNNNNNFFFFFFFFFFFAAAAARRRRRRRRRRRGGGGHHHHHHHHHHYYYYYYYYYYYYTTTTTTTIIIIIIIIGGGGKKKKKKKKKEEEEEEEEEIIIIIIIIVVVVVVVDDDDDDDDLLLLLLLLAAAAALLLLLLLLDDDDDDDDRRRRRRRRRRRIIIIIIIIRRRRRRRRRRRKKKKKKKKKLLLLLLLLAAAAADDDDDDDDNNNNNNNNCCCCCCTTTTTTTGGGGLLLLLLLLQQQQQQQQQGGGGFFFFFFFFFFFLLLLLLLLVVVVVVVFFFFFFFFFFFNNNNNNNNAAAAAVVVVVVVGGGGGGGGGGGGTTTTTTTGGGGSSSSSSGGGGLLLLLLLLGGGGSSSSSSLLLLLLLLLLLLLLLLLLLLLLLLEEEEEEEEERRRRRRRRRRRLLLLLLLLSSSSSSVVVVVVVDDDDDDDDYYYYYYYYYYYYGGGGKKKKKKKKKKKKKKKKKKSSSSSSKKKKKKKKKLLLLLLLLGGGGFFFFFFFFFFFTTTTTTTVVVVVVVYYYYYYYYYYYYPPPPPPPSSSSSSPPPPPPPQQQQQQQQQVVVVVVVSSSSSSTTTTTTTAAAAAVVVVVVVVVVVVVVEEEEEEEEEPPPPPPPYYYYYYYYYYYYNNNNNNNNSSSSSSVVVVVVVLLLLLLLLSSSSSSTTTTTTTHHHHHHHHHHSSSSSSLLLLLLLLLLLLLLLLEEEEEEEEEHHHHHHHHHHTTTTTTTDDDDDDDDVVVVVVVAAAAAVVVVVVVMMMMMMMMLLLLLLLLDDDDDDDDNNNNNNNNEEEEEEEEEAAAAAIIIIIIIIYYYYYYYYYYYYDDDDDDDDIIIIIIIICCCCCCRRRRRRRRRRRRRRRRRRRRRRSSSSSSLLLLLLLLDDDDDDDDIIIIIIIIEEEEEEEEERRRRRRRRRRRPPPPPPPTTTTTTTYYYYYYYYYYYYTTTTTTTNNNNNNNNLLLLLLLLNNNNNNNNRRRRRRRRRRRLLLLLLLLIIIIIIIIAAAAAQQQQQQQQQVVVVVVVIIIIIIIISSSSSSSSSSSSLLLLLLLLTTTTTTTAAAAASSSSSSLLLLLLLLRRRRRRRRRRRFFFFFFFFFFFDDDDDDDDGGGGAAAAALLLLLLLLNNNNNNNNVVVVVVVDDDDDDDDIIIIIIIITTTTTTTEEEEEEEEEFFFFFFFFFFFQQQQQQQQQTTTTTTTNNNNNNNNLLLLLLLLVVVVVVVPPPPPPPYYYYYYYYYYYYPPPPPPPRRRRRRRRRRRIIIIIIIIHHHHHHHHHHFFFFFFFFFFFMMMMMMMMLLLLLLLLSSSSSSSSSSSSYYYYYYYYYYYYAAAAAPPPPPPPIIIIIIIIIIIIIIIISSSSSSAAAAAEEEEEEEEEKKKKKKKKKAAAAAYYYYYYYYYYYYHHHHHHHHHHEEEEEEEEEQQQQQQQQQLLLLLLLLSSSSSSVVVVVVVAAAAAEEEEEEEEEIIIIIIIITTTTTTTNNNNNNNNAAAAAAAAAAFFFFFFFFFFFEEEEEEEEEPPPPPPPAAAAASSSSSSMMMMMMMMMMMMMMMMVVVVVVVKKKKKKKKKCCCCCCDDDDDDDDPPPPPPPLLLLLLLLHHHHHHHHHHGGGGKKKKKKKKKYYYYYYYYYYYYMMMMMMMMAAAAACCCCCCCCCCCCLLLLLLLLMMMMMMMMYYYYYYYYYYYYRRRRRRRRRRRGGGGDDDDDDDDVVVVVVVVVVVVVVPPPPPPPKKKKKKKKKDDDDDDDDVVVVVVVNNNNNNNNAAAAASSSSSSVVVVVVVAAAAATTTTTTTIIIIIIIIKKKKKKKKKTTTTTTTKKKKKKKKKRRRRRRRRRRRTTTTTTTIIIIIIIIQQQQQQQQQFFFFFFFFFFFVVVVVVVDDDDDDDDWWWWWWWWWWWWWWCCCCCCPPPPPPPTTTTTTTGGGGFFFFFFFFFFFKKKKKKKKKCCCCCCGGGGIIIIIIIINNNNNNNNYYYYYYYYYYYYQQQQQQQQQPPPPPPPPPPPPPPTTTTTTTVVVVVVVVVVVVVVPPPPPPPGGGGVVVVVVVDDDDDDDDLLLLLLLLAAAAAKKKKKKKKKVVVVVVVQQQQQQQQQRRRRRRRRRRRAAAAAVVVVVVVCCCCCCMMMMMMMMIIIIIIIISSSSSSNNNNNNNNSSSSSSTTTTTTTAAAAAIIIIIIIIGGGGEEEEEEEEEIIIIIIIIFFFFFFFFFFFSSSSSSRRRRRRRRRRRLLLLLLLLDDDDDDDDHHHHHHHHHHKKKKKKKKKFFFFFFFFFFFDDDDDDDDLLLLLLLLMMMMMMMMYYYYYYYYYYYYAAAAAKKKKKKKKKRRRRRRRRRRRAAAAAFFFFFFFFFFFVVVVVVVHHHHHHHHHHWWWWWWWWWWWWWWYYYYYYYYYYYYVVVVVVVGGGGEEEEEEEEEGGGGMMMMMMMMEEEEEEEEEEEEEEEEEEGGGGEEEEEEEEEFFFFFFFFFFFSSSSSSEEEEEEEEEAAAAARRRRRRRRRRREEEEEEEEEDDDDDDDDLLLLLLLLAAAAAAAAAALLLLLLLLEEEEEEEEEKKKKKKKKKDDDDDDDDFFFFFFFFFFFEEEEEEEEEEEEEEEEEEVVVVVVVGGGGAAAAAEEEEEEEEESSSSSSAAAAAEEEEEEEEEGGGGAAAAAGGGGEEEEEEEEEGGGGEEEEEEEEEGGGGEEEEEEEEEEEEEEEEEEYYYYYYYYYYYYY

SEQ ID NO: 29 - protein, 3511 aa, Drosophila melanogaster
MMMMMMMMRRRRRRRRRRREEEEEEEEECCCCCCIIIIIIIISSSSSSVVVVVVVHHHHHHHHHHIIIIIIIIGGGGQQQQQQQQQAAAAAGGGGVVVVVVVQQQQQQQQQIIIIIIIIGGGGNNNNNNNNAAAAACCCCCCWWWWWWWWWWWWWWEEEEEEEEELLLLLLLLYYYYYYYYYYYYCCCCCCLLLLLLLLEEEEEEEEEHHHHHHHHHHGGGGIIIIIIIIQQQQQQQQQPPPPPPPDDDDDDDDGGGGHHHHHHHHHHMMMMMMMMPPPPPPPSSSSSSDDDDDDDDKKKKKKKKKTTTTTTTVVVVVVVGGGGGGGGGGGGDDDDDDDDDDDDDDDDSSSSSSFFFFFFFFFFFSSSSSSTTTTTTTFFFFFFFFFFFFFFFFFFFFFFSSSSSSEEEEEEEEETTTTTTTGGGGAAAAAGGGGKKKKKKKKKHHHHHHHHHHVVVVVVVPPPPPPPRRRRRRRRRRRAAAAAVVVVVVVFFFFFFFFFFFVVVVVVVDDDDDDDDLLLLLLLLEEEEEEEEEPPPPPPPTTTTTTTVVVVVVVVVVVVVVDDDDDDDDEEEEEEEEEVVVVVVVRRRRRRRRRRRTTTTTTTGGGGTTTTTTTYYYYYYYYYYYYRRRRRRRRRRRQQQQQQQQQLLLLLLLLFFFFFFFFFFFHHHHHHHHHHPPPPPPPEEEEEEEEEQQQQQQQQQLLLLLLLLIIIIIIIITTTTTTTGGGGKKKKKKKKKEEEEEEEEEDDDDDDDDAAAAAAAAAANNNNNNNNNNNNNNNNYYYYYYYYYYYYAAAAARRRRRRRRRRRGGGGHHHHHHHHHHYYYYYYYYYYYYTTTTTTTIIIIIIIIGGGGKKKKKKKKKEEEEEEEEEIIIIIIIIVVVVVVVDDDDDDDDVVVVVVVVVVVVVVLLLLLLLLDDDDDDDDRRRRRRRRRRRIIIIIIIIRRRRRRRRRRRKKKKKKKKKLLLLLLLLAAAAADDDDDDDDQQQQQQQQQCCCCCCTTTTTTTGGGGLLLLLLLLQQQQQQQQQGGGGFFFFFFFFFFFLLLLLLLLVVVVVVVFFFFFFFFFFFHHHHHHHHHHSSSSSSFFFFFFFFFFFGGGGGGGGGGGGTTTTTTTGGGGSSSSSSGGGGFFFFFFFFFFFTTTTTTTSSSSSSLLLLLLLLLLLLLLLLMMMMMMMMEEEEEEEEERRRRRRRRRRRLLLLLLLLSSSSSSVVVVVVVDDDDDDDDYYYYYYYYYYYYGGGGKKKKKKKKKKKKKKKKKKSSSSSSKKKKKKKKKLLLLLLLLEEEEEEEEEFFFFFFFFFFFSSSSSSIIIIIIIIYYYYYYYYYYYYPPPPPPPAAAAAPPPPPPPQQQQQQQQQVVVVVVVSSSSSSTTTTTTTAAAAAVVVVVVVVVVVVVVEEEEEEEEEPPPPPPPYYYYYYYYYYYYNNNNNNNNSSSSSSIIIIIIIILLLLLLLLTTTTTTTTTTTTTTHHHHHHHHHHTTTTTTTTTTTTTTLLLLLLLLEEEEEEEEEHHHHHHHHHHSSSSSSDDDDDDDDCCCCCCAAAAAFFFFFFFFFFFMMMMMMMMVVVVVVVDDDDDDDDNNNNNNNNEEEEEEEEEAAAAAIIIIIIIIYYYYYYYYYYYYDDDDDDDDIIIIIIIICCCCCCRRRRRRRRRRRRRRRRRRRRRRNNNNNNNNLLLLLLLLDDDDDDDDIIIIIIIIEEEEEEEEERRRRRRRRRRRPPPPPPPTTTTTTTYYYYYYYYYYYYMMMMMMMMNNNNNNNNLLLLLLLLNNNNNNNNRRRRRRRRRRRLLLLLLLLIIIIIIIIGGGGQQQQQQQQQIIIIIIIIVVVVVVVSSSSSSSSSSSSIIIIIIIITTTTTTTAAAAASSSSSSLLLLLLLLRRRRRRRRRRRFFFFFFFFFFFDDDDDDDDGGGGAAAAALLLLLLLLNNNNNNNNVVVVVVVDDDDDDDDLLLLLLLLTTTTTTTEEEEEEEEEFFFFFFFFFFFQQQQQQQQQTTTTTTTNNNNNNNNLLLLLLLLVVVVVVVPPPPPPPYYYYYYYYYYYYPPPPPPPRRRRRRRRRRRIIIIIIIIHHHHHHHHHHFFFFFFFFFFFPPPPPPPLLLLLLLLAAAAATTTTTTTYYYYYYYYYYYYAAAAAPPPPPPPVVVVVVVIIIIIIIISSSSSSVVVVVVVEEEEEEEEEKKKKKKKKKAAAAAYYYYYYYYYYYYHHHHHHHHHHEEEEEEEEEQQQQQQQQQLLLLLLLLTTTTTTTVVVVVVVAAAAAEEEEEEEEEIIIIIIIITTTTTTTNNNNNNNNAAAAACCCCCCFFFFFFFFFFFEEEEEEEEEPPPPPPPAAAAANNNNNNNNQQQQQQQQQMMMMMMMMVVVVVVVKKKKKKKKKCCCCCCDDDDDDDDPPPPPPPRRRRRRRRRRRRRRRRRRRRRRGGGGKKKKKKKKKYYYYYYYYYYYYMMMMMMMMAAAAACCCCCCCCCCCCMMMMMMMMLLLLLLLLYYYYYYYYYYYYRRRRRRRRRRRGGGGDDDDDDDDVVVVVVVVVVVVVVPPPPPPPKKKKKKKKKDDDDDDDDVVVVVVVNNNNNNNNAAAAAAAAAAIIIIIIIIAAAAATTTTTTTIIIIIIIIKKKKKKKKKTTTTTTTKKKKKKKKKRRRRRRRRRRRSSSSSSIIIIIIIIQQQQQQQQQFFFFFFFFFFFVVVVVVVDDDDDDDDWWWWWWWWWWWWWWCCCCCCPPPPPPPTTTTTTTGGGGFFFFFFFFFFFKKKKKKKKKVVVVVVVGGGGIIIIIIIINNNNNNNNYYYYYYYYYYYYQQQQQQQQQPPPPPPPPPPPPPPTTTTTTTVVVVVVVVVVVVVVPPPPPPPGGGGGGGGDDDDDDDDLLLLLLLLAAAAAKKKKKKKKKVVVVVVVQQQQQQQQQRRRRRRRRRRRAAAAAVVVVVVVCCCCCCMMMMMMMMLLLLLLLLSSSSSSNNNNNNNNTTTTTTTTTTTTTTAAAAAIIIIIIIIAAAAAEEEEEEEEEAAAAAWWWWWWWWWWWWWWAAAAARRRRRRRRRRRLLLLLLLLDDDDDDDDHHHHHHHHHHKKKKKKKKKFFFFFFFFFFFDDDDDDDDLLLLLLLLMMMMMMMMYYYYYYYYYYYYAAAAAKKKKKKKKKRRRRRRRRRRRAAAAAFFFFFFFFFFFVVVVVVVHHHHHHHHHHWWWWWWWWWWWWWWYYYYYYYYYYYYVVVVVVVGGGGEEEEEEEEEGGGGMMMMMMMMEEEEEEEEEEEEEEEEEEGGGGEEEEEEEEEFFFFFFFFFFFAAAAAEEEEEEEEEAAAAARRRRRRRRRRREEEEEEEEEDDDDDDDDLLLLLLLLAAAAAAAAAALLLLLLLLEEEEEEEEEKKKKKKKKKDDDDDDDDYYYYYYYYYYYYEEEEEEEEEEEEEEEEEEVVVVVVVGGGGIIIIIIIIDDDDDDDDSSSSSSTTTTTTTTTTTTTTEEEEEEEEELLLLLLLLGGGGEEEEEEEEEDDDDDDDDEEEEEEEEEEEEEEEEEEYYYYYYYYYYYYY

SEQ ID NO: 30 - protein, 3503 aa, Eleusine indica
MMMMMMMMRRRRRRRRRRREEEEEEEEEIIIIIIIIIIIIIIIISSSSSSIIIIIIIIHHHHHHHHHHIIIIIIIIGGGGQQQQQQQQQAAAAAGGGGIIIIIIIIQQQQQQQQQVVVVVVVGGGGNNNNNNNNSSSSSSCCCCCCWWWWWWWWWWWWWWEEEEEEEEELLLLLLLLYYYYYYYYYYYYCCCCCCLLLLLLLLEEEEEEEEEHHHHHHHHHHGGGGIIIIIIIIQQQQQQQQQPPPPPPPDDDDDDDDGGGGLLLLLLLLMMMMMMMMPPPPPPPSSSSSSDDDDDDDDTTTTTTTSSSSSSLLLLLLLLGGGGVVVVVVVAAAAARRRRRRRRRRRDDDDDDDDAAAAAFFFFFFFFFFFNNNNNNNNTTTTTTTFFFFFFFFFFFFFFFFFFFFFFSSSSSSEEEEEEEEETTTTTTTGGGGAAAAAGGGGKKKKKKKKKHHHHHHHHHHVVVVVVVPPPPPPPRRRRRRRRRRRAAAAALLLLLLLLFFFFFFFFFFFVVVVVVVDDDDDDDDLLLLLLLLEEEEEEEEEPPPPPPPTTTTTTTVVVVVVVIIIIIIIIDDDDDDDDEEEEEEEEEVVVVVVVKKKKKKKKKTTTTTTTGGGGPPPPPPPYYYYYYYYYYYYRRRRRRRRRRRQQQQQQQQQLLLLLLLLFFFFFFFFFFFHHHHHHHHHHPPPPPPPEEEEEEEEEQQQQQQQQQLLLLLLLLIIIIIIIISSSSSSYYYYYYYYYYYYKKKKKKKKKEEEEEEEEEDDDDDDDDAAAAAAAAAANNNNNNNNNNNNNNNNFFFFFFFFFFFAAAAARRRRRRRRRRRGGGGHHHHHHHHHHYYYYYYYYYYYYTTTTTTTVVVVVVVGGGGRRRRRRRRRRREEEEEEEEEIIIIIIIIVVVVVVVDDDDDDDDPPPPPPPCCCCCCLLLLLLLLDDDDDDDDRRRRRRRRRRRIIIIIIIIRRRRRRRRRRRKKKKKKKKKLLLLLLLLAAAAADDDDDDDDNNNNNNNNCCCCCCTTTTTTTGGGGLLLLLLLLQQQQQQQQQGGGGFFFFFFFFFFFLLLLLLLLVVVVVVVFFFFFFFFFFFNNNNNNNNAAAAAVVVVVVVGGGGGGGGGGGGTTTTTTTGGGGSSSSSSGGGGLLLLLLLLGGGGSSSSSSLLLLLLLLLLLLLLLLLLLLLLLLEEEEEEEEERRRRRRRRRRRLLLLLLLLSSSSSSVVVVVVVDDDDDDDDYYYYYYYYYYYYGGGGRRRRRRRRRRRKKKKKKKKKSSSSSSKKKKKKKKKLLLLLLLLGGGGFFFFFFFFFFFTTTTTTTIIIIIIIIYYYYYYYYYYYYPPPPPPPSSSSSSPPPPPPPQQQQQQQQQIIIIIIIISSSSSSTTTTTTTAAAAAVVVVVVVVVVVVVVEEEEEEEEEPPPPPPPYYYYYYYYYYYYNNNNNNNNSSSSSSVVVVVVVLLLLLLLLSSSSSSTTTTTTTHHHHHHHHHHSSSSSSLLLLLLLLIIIIIIIIEEEEEEEEEHHHHHHHHHHTTTTTTTDDDDDDDDVVVVVVVVVVVVVVVVVVVVVLLLLLLLLLLLLLLLLDDDDDDDDNNNNNNNNEEEEEEEEEAAAAAIIIIIIIIYYYYYYYYYYYYDDDDDDDDIIIIIIIICCCCCCKKKKKKKKKRRRRRRRRRRRSSSSSSLLLLLLLLDDDDDDDDIIIIIIIIEEEEEEEEERRRRRRRRRRRPPPPPPPTTTTTTTYYYYYYYYYYYYTTTTTTTNNNNNNNNLLLLLLLLNNNNNNNNRRRRRRRRRRRLLLLLLLLIIIIIIIISSSSSSQQQQQQQQQVVVVVVVIIIIIIIISSSSSSSSSSSSLLLLLLLLTTTTTTTTTTTTTTSSSSSSLLLLLLLLRRRRRRRRRRRFFFFFFFFFFFDDDDDDDDGGGGAAAAAIIIIIIIINNNNNNNNVVVVVVVDDDDDDDDIIIIIIIITTTTTTTEEEEEEEEEFFFFFFFFFFFQQQQQQQQQTTTTTTTNNNNNNNNLLLLLLLLVVVVVVVPPPPPPPYYYYYYYYYYYYPPPPPPPRRRRRRRRRRRIIIIIIIIHHHHHHHHHHFFFFFFFFFFFMMMMMMMMLLLLLLLLSSSSSSSSSSSSYYYYYYYYYYYYAAAAAPPPPPPPIIIIIIIIIIIIIIIISSSSSSVVVVVVVEEEEEEEEEKKKKKKKKKAAAAAYYYYYYYYYYYYHHHHHHHHHHEEEEEEEEEQQQQQQQQQHHHHHHHHHHSSSSSSVVVVVVVPPPPPPPEEEEEEEEEIIIIIIIITTTTTTTNNNNNNNNSSSSSSVVVVVVVFFFFFFFFFFFEEEEEEEEESSSSSSSSSSSSSSSSSSVVVVVVVMMMMMMMMAAAAAKKKKKKKKKCCCCCCDDDDDDDDPPPPPPPRRRRRRRRRRRHHHHHHHHHHGGGGKKKKKKKKKYYYYYYYYYYYYMMMMMMMMAAAAACCCCCCCCCCCCLLLLLLLLMMMMMMMMYYYYYYYYYYYYRRRRRRRRRRRGGGGDDDDDDDDVVVVVVVVVVVVVVPPPPPPPKKKKKKKKKDDDDDDDDVVVVVVVNNNNNNNNAAAAAAAAAAVVVVVVVHHHHHHHHHHSSSSSSIIIIIIIIKKKKKKKKKTTTTTTTKKKKKKKKKRRRRRRRRRRRTTTTTTTVVVVVVVQQQQQQQQQFFFFFFFFFFFVVVVVVVDDDDDDDDWWWWWWWWWWWWWWCCCCCCPPPPPPPTTTTTTTGGGGFFFFFFFFFFFKKKKKKKKKCCCCCCGGGGIIIIIIIINNNNNNNNYYYYYYYYYYYYQQQQQQQQQPPPPPPPPPPPPPPTTTTTTTVVVVVVVVVVVVVVPPPPPPPGGGGGGGGDDDDDDDDLLLLLLLLAAAAAKKKKKKKKKVVVVVVVQQQQQQQQQRRRRRRRRRRRAAAAAVVVVVVVCCCCCCMMMMMMMMIIIIIIIISSSSSSNNNNNNNNNNNNNNNNTTTTTTTAAAAAVVVVVVVAAAAAEEEEEEEEEVVVVVVVFFFFFFFFFFFSSSSSSRRRRRRRRRRRIIIIIIIIDDDDDDDDRRRRRRRRRRRKKKKKKKKKFFFFFFFFFFFDDDDDDDDLLLLLLLLMMMMMMMMYYYYYYYYYYYYAAAAAKKKKKKKKKRRRRRRRRRRRAAAAAFFFFFFFFFFFVVVVVVVHHHHHHHHHHWWWWWWWWWWWWWWYYYYYYYYYYYYVVVVVVVGGGGEEEEEEEEEGGGGMMMMMMMMEEEEEEEEEEEEEEEEEEGGGGEEEEEEEEEFFFFFFFFFFFSSSSSSEEEEEEEEEAAAAARRRRRRRRRRREEEEEEEEEDDDDDDDDLLLLLLLLAAAAAAAAAALLLLLLLLEEEEEEEEEKKKKKKKKKDDDDDDDDYYYYYYYYYYYYEEEEEEEEEEEEEEEEEEVVVVVVVGGGGAAAAAEEEEEEEEEVVVVVVVEEEEEEEEEEEEEEEEEEDDDDDDDDDDDDDDDDEEEEEEEEEEEEEEEEEEEEEEEEEEEYYYYYYYYYYYYY

SEQ ID NO: 31 - protein, 3536 aa, Emericella nidulans
MMMMMMMMRRRRRRRRRRRGGGGEEEEEEEEEVVVVVVVCCCCCCHHHHHHHHHHIIIIIIIIHHHHHHHHHHIIIIIIIIGGGGQQQQQQQQQAAAAAGGGGTTTTTTTQQQQQQQQQLLLLLLLLGGGGNNNNNNNNSSSSSSAAAAAWWWWWWWWWWWWWWEEEEEEEEELLLLLLLLYYYYYYYYYYYYLLLLLLLLLLLLLLLLEEEEEEEEEHHHHHHHHHHGGGGLLLLLLLLGGGGAAAAADDDDDDDDGGGGRRRRRRRRRRRLLLLLLLLDDDDDDDDPPPPPPPEEEEEEEEEKKKKKKKKKGGGGEEEEEEEEEDDDDDDDDIIIIIIIINNNNNNNNAAAAAGGGGGGGGSSSSSSFFFFFFFFFFFEEEEEEEEETTTTTTTFFFFFFFFFFFFFFFFFFFFFFTTTTTTTEEEEEEEEETTTTTTTGGGGCCCCCCGGGGKKKKKKKKKYYYYYYYYYYYYVVVVVVVPPPPPPPRRRRRRRRRRRSSSSSSIIIIIIIIFFFFFFFFFFFVVVVVVVDDDDDDDDLLLLLLLLDDDDDDDDPPPPPPPSSSSSSPPPPPPPIIIIIIIIDDDDDDDDEEEEEEEEEIIIIIIIIRRRRRRRRRRRTTTTTTTGGGGPPPPPPPYYYYYYYYYYYYRRRRRRRRRRRQQQQQQQQQLLLLLLLLFFFFFFFFFFFHHHHHHHHHHPPPPPPPEEEEEEEEEQQQQQQQQQLLLLLLLLIIIIIIIISSSSSSGGGGKKKKKKKKKEEEEEEEEEDDDDDDDDAAAAAAAAAANNNNNNNNNNNNNNNNYYYYYYYYYYYYAAAAARRRRRRRRRRRGGGGHHHHHHHHHHYYYYYYYYYYYYTTTTTTTVVVVVVVGGGGKKKKKKKKKEEEEEEEEELLLLLLLLVVVVVVVDDDDDDDDTTTTTTTVVVVVVVVVVVVVVDDDDDDDDRRRRRRRRRRRVVVVVVVRRRRRRRRRRRRRRRRRRRRRRLLLLLLLLSSSSSSDDDDDDDDNNNNNNNNCCCCCCSSSSSSSSSSSSLLLLLLLLQQQQQQQQQGGGGFFFFFFFFFFFLLLLLLLLVVVVVVVFFFFFFFFFFFHHHHHHHHHHSSSSSSFFFFFFFFFFFGGGGGGGGGGGGTTTTTTTGGGGSSSSSSGGGGFFFFFFFFFFFGGGGAAAAALLLLLLLLLLLLLLLLLLLLLLLLEEEEEEEEERRRRRRRRRRRLLLLLLLLSSSSSSTTTTTTTEEEEEEEEEYYYYYYYYYYYYGGGGKKKKKKKKKKKKKKKKKKSSSSSSKKKKKKKKKLLLLLLLLEEEEEEEEEFFFFFFFFFFFAAAAAVVVVVVVYYYYYYYYYYYYPPPPPPPSSSSSSPPPPPPPRRRRRRRRRRRVVVVVVVSSSSSSTTTTTTTAAAAAVVVVVVVVVVVVVVEEEEEEEEEPPPPPPPYYYYYYYYYYYYNNNNNNNNAAAAAVVVVVVVLLLLLLLLSSSSSSTTTTTTTHHHHHHHHHHSSSSSSTTTTTTTLLLLLLLLEEEEEEEEENNNNNNNNSSSSSSDDDDDDDDCCCCCCTTTTTTTFFFFFFFFFFFLLLLLLLLVVVVVVVDDDDDDDDNNNNNNNNEEEEEEEEEAAAAAVVVVVVVYYYYYYYYYYYYDDDDDDDDIIIIIIIICCCCCCRRRRRRRRRRRRRRRRRRRRRRNNNNNNNNLLLLLLLLDDDDDDDDIIIIIIIIPPPPPPPRRRRRRRRRRRPPPPPPPSSSSSSFFFFFFFFFFFEEEEEEEEEHHHHHHHHHHLLLLLLLLNNNNNNNNRRRRRRRRRRRLLLLLLLLIIIIIIIIAAAAAQQQQQQQQQVVVVVVVVVVVVVVSSSSSSSSSSSSIIIIIIIITTTTTTTSSSSSSSSSSSSLLLLLLLLRRRRRRRRRRRFFFFFFFFFFFDDDDDDDDGGGGAAAAALLLLLLLLNNNNNNNNVVVVVVVDDDDDDDDLLLLLLLLNNNNNNNNEEEEEEEEEFFFFFFFFFFFQQQQQQQQQTTTTTTTNNNNNNNNLLLLLLLLVVVVVVVPPPPPPPFFFFFFFFFFFPPPPPPPRRRRRRRRRRRIIIIIIIIHHHHHHHHHHYYYYYYYYYYYYPPPPPPPLLLLLLLLIIIIIIIISSSSSSYYYYYYYYYYYYAAAAAPPPPPPPVVVVVVVIIIIIIIISSSSSSSSSSSSNNNNNNNNRRRRRRRRRRRSSSSSSLLLLLLLLHHHHHHHHHHEEEEEEEEESSSSSSFFFFFFFFFFFKKKKKKKKKVVVVVVVQQQQQQQQQDDDDDDDDLLLLLLLLTTTTTTTLLLLLLLLQQQQQQQQQCCCCCCAAAAAEEEEEEEEEPPPPPPPNNNNNNNNNNNNNNNNQQQQQQQQQMMMMMMMMVVVVVVVRRRRRRRRRRRCCCCCCDDDDDDDDPPPPPPPRRRRRRRRRRRNNNNNNNNGGGGKKKKKKKKKYYYYYYYYYYYYMMMMMMMMAAAAAVVVVVVVAAAAALLLLLLLLLLLLLLLLYYYYYYYYYYYYRRRRRRRRRRRGGGGDDDDDDDDCCCCCCVVVVVVVPPPPPPPRRRRRRRRRRRDDDDDDDDCCCCCCTTTTTTTQQQQQQQQQAAAAAIIIIIIIIAAAAASSSSSSLLLLLLLLKKKKKKKKKAAAAAKKKKKKKKKAAAAASSSSSSFFFFFFFFFFFNNNNNNNNYYYYYYYYYYYYVVVVVVVEEEEEEEEEWWWWWWWWWWWWWWCCCCCCPPPPPPPTTTTTTTGGGGFFFFFFFFFFFKKKKKKKKKVVVVVVVGGGGIIIIIIIINNNNNNNNYYYYYYYYYYYYHHHHHHHHHHKKKKKKKKKPPPPPPPAAAAARRRRRRRRRRRVVVVVVVPPPPPPPGGGGTTTTTTTEEEEEEEEELLLLLLLLAAAAAPPPPPPPVVVVVVVDDDDDDDDRRRRRRRRRRRAAAAAVVVVVVVCCCCCCMMMMMMMMLLLLLLLLSSSSSSNNNNNNNNTTTTTTTTTTTTTTAAAAAIIIIIIIISSSSSSEEEEEEEEEAAAAAWWWWWWWWWWWWWWSSSSSSRRRRRRRRRRRLLLLLLLLDDDDDDDDHHHHHHHHHHKKKKKKKKKFFFFFFFFFFFDDDDDDDDLLLLLLLLMMMMMMMMYYYYYYYYYYYYSSSSSSKKKKKKKKKRRRRRRRRRRRAAAAAFFFFFFFFFFFVVVVVVVHHHHHHHHHHWWWWWWWWWWWWWWYYYYYYYYYYYYVVVVVVVGGGGEEEEEEEEEGGGGMMMMMMMMEEEEEEEEEEEEEEEEEEGGGGEEEEEEEEEFFFFFFFFFFFSSSSSSEEEEEEEEEAAAAARRRRRRRRRRREEEEEEEEEDDDDDDDDLLLLLLLLAAAAAAAAAALLLLLLLLEEEEEEEEEKKKKKKKKKDDDDDDDDYYYYYYYYYYYYEEEEEEEEEEEEEEEEEEVVVVVVVAAAAAGGGGDDDDDDDDSSSSSSLLLLLLLLDDDDDDDDMMMMMMMMEEEEEEEEEGGGGEEEEEEEEEEEEEEEEEEAAAAAEEEEEEEEEYYYYYYYYYYYYY

SEQ ID NO: 32 - protein, 3528 aa, Homarus americanus
MMMMMMMMRRRRRRRRRRREEEEEEEEECCCCCCIIIIIIIISSSSSSIIIIIIIIHHHHHHHHHHVVVVVVVGGGGQQQQQQQQQAAAAAGGGGVVVVVVVQQQQQQQQQMMMMMMMMGGGGNNNNNNNNSSSSSSCCCCCCWWWWWWWWWWWWWWEEEEEEEEELLLLLLLLYYYYYYYYYYYYCCCCCCLLLLLLLLEEEEEEEEEHHHHHHHHHHGGGGIIIIIIIIQQQQQQQQQPPPPPPPDDDDDDDDGGGGQQQQQQQQQMMMMMMMMPPPPPPPSSSSSSDDDDDDDDKKKKKKKKKTTTTTTTVVVVVVVGGGGVVVVVVVCCCCCCNNNNNNNNDDDDDDDDSSSSSSFFFFFFFFFFFNNNNNNNNTTTTTTTFFFFFFFFFFFFFFFFFFFFFFTTTTTTTEEEEEEEEETTTTTTTGGGGSSSSSSGGGGKKKKKKKKKHHHHHHHHHHVVVVVVVPPPPPPPRRRRRRRRRRRAAAAAVVVVVVVFFFFFFFFFFFVVVVVVVDDDDDDDDLLLLLLLLEEEEEEEEEPPPPPPPSSSSSSVVVVVVVIIIIIIIIDDDDDDDDEEEEEEEEEVVVVVVVRRRRRRRRRRRSSSSSSGGGGIIIIIIIIYYYYYYYYYYYYRRRRRRRRRRRQQQQQQQQQLLLLLLLLFFFFFFFFFFFHHHHHHHHHHPPPPPPPEEEEEEEEEQQQQQQQQQLLLLLLLLIIIIIIIISSSSSSGGGGKKKKKKKKKEEEEEEEEEDDDDDDDDAAAAAAAAAANNNNNNNNNNNNNNNNYYYYYYYYYYYYAAAAARRRRRRRRRRRGGGGHHHHHHHHHHYYYYYYYYYYYYTTTTTTTIIIIIIIIGGGGKKKKKKKKKEEEEEEEEEYYYYYYYYYYYYVVVVVVVDDDDDDDDIIIIIIIIVVVVVVVLLLLLLLLDDDDDDDDRRRRRRRRRRRIIIIIIIIRRRRRRRRRRRKKKKKKKKKLLLLLLLLAAAAADDDDDDDDQQQQQQQQQCCCCCCTTTTTTTGGGGLLLLLLLLQQQQQQQQQGGGGFFFFFFFFFFFLLLLLLLLIIIIIIIIFFFFFFFFFFFRRRRRRRRRRRSSSSSSFFFFFFFFFFFGGGGGGGGGGGGTTTTTTTGGGGSSSSSSGGGGFFFFFFFFFFFAAAAASSSSSSLLLLLLLLLLLLLLLLMMMMMMMMEEEEEEEEERRRRRRRRRRRLLLLLLLLSSSSSSVVVVVVVEEEEEEEEEYYYYYYYYYYYYGGGGKKKKKKKKKKKKKKKKKKSSSSSSKKKKKKKKKLLLLLLLLEEEEEEEEEIIIIIIIIAAAAAIIIIIIIIYYYYYYYYYYYYPPPPPPPAAAAAPPPPPPPQQQQQQQQQSSSSSSAAAAATTTTTTTSSSSSSVVVVVVVVVVVVVVEEEEEEEEEPPPPPPPYYYYYYYYYYYYNNNNNNNNSSSSSSIIIIIIIILLLLLLLLTTTTTTTTTTTTTTHHHHHHHHHHTTTTTTTTTTTTTTLLLLLLLLEEEEEEEEEHHHHHHHHHHSSSSSSDDDDDDDDCCCCCCCCCCCCFFFFFFFFFFFMMMMMMMMVVVVVVVDDDDDDDDNNNNNNNNEEEEEEEEEAAAAAIIIIIIIIFFFFFFFFFFFDDDDDDDDIIIIIIIICCCCCCQQQQQQQQQRRRRRRRRRRRNNNNNNNNLLLLLLLLDDDDDDDDVVVVVVVSSSSSSRRRRRRRRRRRPPPPPPPTTTTTTTYYYYYYYYYYYYTTTTTTTNNNNNNNNLLLLLLLLNNNNNNNNRRRRRRRRRRRLLLLLLLLIIIIIIIIGGGGQQQQQQQQQIIIIIIIIVVVVVVVSSSSSSSSSSSSIIIIIIIITTTTTTTAAAAASSSSSSLLLLLLLLRRRRRRRRRRRFFFFFFFFFFFEEEEEEEEEGGGGAAAAALLLLLLLLNNNNNNNNVVVVVVVDDDDDDDDLLLLLLLLTTTTTTTEEEEEEEEEFFFFFFFFFFFQQQQQQQQQTTTTTTTNNNNNNNNLLLLLLLLVVVVVVVPPPPPPPYYYYYYYYYYYYPPPPPPPRRRRRRRRRRRIIIIIIIIHHHHHHHHHHFFFFFFFFFFFPPPPPPPLLLLLLLLTTTTTTTTTTTTTTYYYYYYYYYYYYSSSSSSPPPPPPPIIIIIIIIIIIIIIIISSSSSSAAAAAEEEEEEEEEKKKKKKKKKAAAAAYYYYYYYYYYYYHHHHHHHHHHEEEEEEEEEQQQQQQQQQLLLLLLLLSSSSSSVVVVVVVGGGGEEEEEEEEEIIIIIIIITTTTTTTSSSSSSAAAAACCCCCCFFFFFFFFFFFEEEEEEEEEPPPPPPPAAAAANNNNNNNNQQQQQQQQQMMMMMMMMVVVVVVVKKKKKKKKKCCCCCCDDDDDDDDPPPPPPPRRRRRRRRRRRHHHHHHHHHHGGGGKKKKKKKKKYYYYYYYYYYYYMMMMMMMMAAAAACCCCCCCCCCCCLLLLLLLLLLLLLLLLYYYYYYYYYYYYRRRRRRRRRRRGGGGDDDDDDDDVVVVVVVVVVVVVVPPPPPPPKKKKKKKKKDDDDDDDDVVVVVVVTTTTTTTAAAAASSSSSSIIIIIIIIAAAAANNNNNNNNVVVVVVVKKKKKKKKKTTTTTTTKKKKKKKKKRRRRRRRRRRRTTTTTTTIIIIIIIIQQQQQQQQQFFFFFFFFFFFVVVVVVVDDDDDDDDWWWWWWWWWWWWWWCCCCCCPPPPPPPTTTTTTTGGGGFFFFFFFFFFFKKKKKKKKKVVVVVVVGGGGIIIIIIIINNNNNNNNYYYYYYYYYYYYQQQQQQQQQPPPPPPPPPPPPPPTTTTTTTVVVVVVVVVVVVVVPPPPPPPGGGGAAAAADDDDDDDDLLLLLLLLAAAAAKKKKKKKKKVVVVVVVSSSSSSRRRRRRRRRRRAAAAAVVVVVVVCCCCCCMMMMMMMMLLLLLLLLSSSSSSNNNNNNNNTTTTTTTTTTTTTTAAAAAIIIIIIIIAAAAAEEEEEEEEEAAAAAWWWWWWWWWWWWWWAAAAARRRRRRRRRRRLLLLLLLLDDDDDDDDHHHHHHHHHHKKKKKKKKKVVVVVVVDDDDDDDDLLLLLLLLMMMMMMMMYYYYYYYYYYYYAAAAAKKKKKKKKKRRRRRRRRRRRAAAAAFFFFFFFFFFFVVVVVVVHHHHHHHHHHWWWWWWWWWWWWWWYYYYYYYYYYYYVVVVVVVGGGGEEEEEEEEEGGGGMMMMMMMMEEEEEEEEEEEEEEEEEERRRRRRRRRRRQQQQQQQQQFFFFFFFFFFFSSSSSSEEEEEEEEEAAAAARRRRRRRRRRREEEEEEEEEDDDDDDDDLLLLLLLLAAAAATTTTTTTLLLLLLLLEEEEEEEEEKKKKKKKKKDDDDDDDDYYYYYYYYYYYYEEEEEEEEEEEEEEEEEEVVVVVVVGGGGIIIIIIIIDDDDDDDDTTTTTTTAAAAADDDDDDDDGGGGEEEEEEEEEDDDDDDDDDDDDDDDDEEEEEEEEEEEEEEEEEEAAAAANNNNNNNNDDDDDDDDYYYYYYYYYYYYY

SEQ ID NO: 33 - protein, 3491 aa, Hordeum vulgare
MMMMMMMMRRRRRRRRRRREEEEEEEEECCCCCCIIIIIIIISSSSSSIIIIIIIIHHHHHHHHHHIIIIIIIIGGGGQQQQQQQQQAAAAAGGGGIIIIIIIIQQQQQQQQQVVVVVVVGGGGNNNNNNNNAAAAACCCCCCWWWWWWWWWWWWWWEEEEEEEEELLLLLLLLYYYYYYYYYYYYCCCCCCLLLLLLLLEEEEEEEEEHHHHHHHHHHGGGGIIIIIIIIQQQQQQQQQPPPPPPPDDDDDDDDGGGGQQQQQQQQQMMMMMMMMPPPPPPPGGGGDDDDDDDDKKKKKKKKKTTTTTTTVVVVVVVGGGGGGGGGGGGDDDDDDDDDDDDDDDDAAAAAFFFFFFFFFFFNNNNNNNNTTTTTTTFFFFFFFFFFFFFFFFFFFFFFSSSSSSEEEEEEEEETTTTTTTGGGGAAAAAGGGGKKKKKKKKKHHHHHHHHHHVVVVVVVPPPPPPPRRRRRRRRRRRAAAAAVVVVVVVFFFFFFFFFFFVVVVVVVDDDDDDDDLLLLLLLLEEEEEEEEEPPPPPPPTTTTTTTVVVVVVVIIIIIIIIDDDDDDDDEEEEEEEEEVVVVVVVRRRRRRRRRRRTTTTTTTGGGGAAAAAYYYYYYYYYYYYRRRRRRRRRRRQQQQQQQQQLLLLLLLLFFFFFFFFFFFHHHHHHHHHHPPPPPPPEEEEEEEEEQQQQQQQQQLLLLLLLLIIIIIIIISSSSSSGGGGKKKKKKKKKEEEEEEEEEDDDDDDDDAAAAAAAAAANNNNNNNNNNNNNNNNFFFFFFFFFFFAAAAARRRRRRRRRRRGGGGHHHHHHHHHHYYYYYYYYYYYYTTTTTTTIIIIIIIIGGGGKKKKKKKKKEEEEEEEEEIIIIIIIIVVVVVVVDDDDDDDDLLLLLLLLCCCCCCLLLLLLLLDDDDDDDDRRRRRRRRRRRIIIIIIIIRRRRRRRRRRRKKKKKKKKKLLLLLLLLSSSSSSDDDDDDDDNNNNNNNNCCCCCCTTTTTTTGGGGLLLLLLLLQQQQQQQQQGGGGFFFFFFFFFFFLLLLLLLLVVVVVVVFFFFFFFFFFFNNNNNNNNAAAAAVVVVVVVGGGGGGGGGGGGTTTTTTTGGGGSSSSSSGGGGLLLLLLLLGGGGSSSSSSLLLLLLLLLLLLLLLLLLLLLLLLEEEEEEEEERRRRRRRRRRRLLLLLLLLSSSSSSVVVVVVVDDDDDDDDYYYYYYYYYYYYGGGGKKKKKKKKKKKKKKKKKKSSSSSSKKKKKKKKKLLLLLLLLGGGGFFFFFFFFFFFTTTTTTTVVVVVVVYYYYYYYYYYYYPPPPPPPSSSSSSPPPPPPPQQQQQQQQQVVVVVVVSSSSSSTTTTTTTSSSSSSVVVVVVVVVVVVVVEEEEEEEEEPPPPPPPYYYYYYYYYYYYNNNNNNNNSSSSSSVVVVVVVLLLLLLLLSSSSSSTTTTTTTHHHHHHHHHHSSSSSSLLLLLLLLLLLLLLLLEEEEEEEEEHHHHHHHHHHTTTTTTTDDDDDDDDVVVVVVVSSSSSSIIIIIIIILLLLLLLLLLLLLLLLDDDDDDDDNNNNNNNNEEEEEEEEEAAAAAIIIIIIIIYYYYYYYYYYYYDDDDDDDDIIIIIIIICCCCCCRRRRRRRRRRRRRRRRRRRRRRSSSSSSLLLLLLLLDDDDDDDDIIIIIIIIEEEEEEEEERRRRRRRRRRRPPPPPPPTTTTTTTYYYYYYYYYYYYTTTTTTTNNNNNNNNLLLLLLLLNNNNNNNNRRRRRRRRRRRLLLLLLLLVVVVVVVSSSSSSQQQQQQQQQVVVVVVVIIIIIIIISSSSSSSSSSSSLLLLLLLLTTTTTTTAAAAASSSSSSLLLLLLLLRRRRRRRRRRRFFFFFFFFFFFDDDDDDDDGGGGAAAAALLLLLLLLNNNNNNNNVVVVVVVDDDDDDDDVVVVVVVNNNNNNNNEEEEEEEEEFFFFFFFFFFFQQQQQQQQQTTTTTTTNNNNNNNNLLLLLLLLVVVVVVVPPPPPPPYYYYYYYYYYYYPPPPPPPRRRRRRRRRRRIIIIIIIIHHHHHHHHHHFFFFFFFFFFFMMMMMMMMLLLLLLLLSSSSSSSSSSSSYYYYYYYYYYYYAAAAAPPPPPPPVVVVVVVIIIIIIIISSSSSSAAAAAEEEEEEEEEKKKKKKKKKAAAAAYYYYYYYYYYYYHHHHHHHHHHEEEEEEEEEQQQQQQQQQLLLLLLLLSSSSSSVVVVVVVAAAAAEEEEEEEEEIIIIIIIITTTTTTTNNNNNNNNSSSSSSAAAAAFFFFFFFFFFFEEEEEEEEEPPPPPPPSSSSSSSSSSSSMMMMMMMMMMMMMMMMAAAAAKKKKKKKKKCCCCCCDDDDDDDDPPPPPPPRRRRRRRRRRRHHHHHHHHHHGGGGKKKKKKKKKYYYYYYYYYYYYMMMMMMMMAAAAACCCCCCCCCCCCLLLLLLLLMMMMMMMMYYYYYYYYYYYYRRRRRRRRRRRGGGGDDDDDDDDVVVVVVVVVVVVVVPPPPPPPKKKKKKKKKDDDDDDDDVVVVVVVNNNNNNNNAAAAAAAAAAVVVVVVVAAAAATTTTTTTIIIIIIIIKKKKKKKKKTTTTTTTKKKKKKKKKRRRRRRRRRRRTTTTTTTIIIIIIIIQQQQQQQQQFFFFFFFFFFFVVVVVVVDDDDDDDDWWWWWWWWWWWWWWCCCCCCPPPPPPPTTTTTTTGGGGFFFFFFFFFFFKKKKKKKKKCCCCCCGGGGIIIIIIIINNNNNNNNYYYYYYYYYYYYQQQQQQQQQPPPPPPPPPPPPPPGGGGVVVVVVVVVVVVVVPPPPPPPGGGGGGGGDDDDDDDDLLLLLLLLAAAAAKKKKKKKKKVVVVVVVQQQQQQQQQRRRRRRRRRRRAAAAAVVVVVVVCCCCCCMMMMMMMMIIIIIIIISSSSSSNNNNNNNNSSSSSSTTTTTTTSSSSSSVVVVVVVVVVVVVVEEEEEEEEEVVVVVVVFFFFFFFFFFFSSSSSSRRRRRRRRRRRIIIIIIIIDDDDDDDDHHHHHHHHHHKKKKKKKKKFFFFFFFFFFFDDDDDDDDLLLLLLLLMMMMMMMMYYYYYYYYYYYYAAAAAKKKKKKKKKRRRRRRRRRRRAAAAAFFFFFFFFFFFVVVVVVVHHHHHHHHHHWWWWWWWWWWWWWWYYYYYYYYYYYYVVVVVVVGGGGEEEEEEEEEGGGGMMMMMMMMEEEEEEEEEEEEEEEEEEGGGGEEEEEEEEEFFFFFFFFFFFSSSSSSEEEEEEEEEAAAAARRRRRRRRRRREEEEEEEEEDDDDDDDDLLLLLLLLAAAAAAAAAALLLLLLLLEEEEEEEEEKKKKKKKKKDDDDDDDDYYYYYYYYYYYYEEEEEEEEEEEEEEEEEEVVVVVVVGGGGAAAAAEEEEEEEEEFFFFFFFFFFFDDDDDDDDDDDDDDDDGGGGEEEEEEEEEDDDDDDDDGGGGDDDDDDDDEEEEEEEEEGGGGDDDDDDDDEEEEEEEEEYYYYYYYYYYYYY

SEQ ID NO: 34 - protein, 3512 aa, Homo sapiens
MMMMMMMMRRRRRRRRRRREEEEEEEEECCCCCCIIIIIIIISSSSSSIIIIIIIIHHHHHHHHHHVVVVVVVGGGGQQQQQQQQQAAAAAGGGGVVVVVVVQQQQQQQQQIIIIIIIIGGGGNNNNNNNNAAAAACCCCCCWWWWWWWWWWWWWWEEEEEEEEELLLLLLLLYYYYYYYYYYYYCCCCCCLLLLLLLLEEEEEEEEEHHHHHHHHHHGGGGIIIIIIIIQQQQQQQQQPPPPPPPDDDDDDDDGGGGQQQQQQQQQMMMMMMMMPPPPPPPSSSSSSDDDDDDDDKKKKKKKKKTTTTTTTIIIIIIIIGGGGGGGGGGGGDDDDDDDDDDDDDDDDSSSSSSFFFFFFFFFFFNNNNNNNNTTTTTTTFFFFFFFFFFFFFFFFFFFFFFSSSSSSEEEEEEEEETTTTTTTGGGGAAAAAGGGGKKKKKKKKKHHHHHHHHHHVVVVVVVPPPPPPPRRRRRRRRRRRAAAAAVVVVVVVFFFFFFFFFFFVVVVVVVDDDDDDDDLLLLLLLLEEEEEEEEEPPPPPPPTTTTTTTVVVVVVVVVVVVVVDDDDDDDDEEEEEEEEEVVVVVVVRRRRRRRRRRRTTTTTTTGGGGTTTTTTTYYYYYYYYYYYYRRRRRRRRRRRQQQQQQQQQLLLLLLLLFFFFFFFFFFFHHHHHHHHHHPPPPPPPEEEEEEEEEQQQQQQQQQLLLLLLLLIIIIIIIITTTTTTTGGGGKKKKKKKKKEEEEEEEEEDDDDDDDDAAAAAAAAAANNNNNNNNNNNNNNNNYYYYYYYYYYYYAAAAARRRRRRRRRRRGGGGHHHHHHHHHHYYYYYYYYYYYYTTTTTTTIIIIIIIIGGGGKKKKKKKKKEEEEEEEEEIIIIIIIIVVVVVVVDDDDDDDDLLLLLLLLVVVVVVVLLLLLLLLDDDDDDDDRRRRRRRRRRRIIIIIIIIRRRRRRRRRRRKKKKKKKKKLLLLLLLLAAAAADDDDDDDDLLLLLLLLCCCCCCTTTTTTTGGGGLLLLLLLLQQQQQQQQQGGGGFFFFFFFFFFFLLLLLLLLIIIIIIIIFFFFFFFFFFFHHHHHHHHHHSSSSSSFFFFFFFFFFFGGGGGGGGGGGGTTTTTTTGGGGSSSSSSGGGGFFFFFFFFFFFAAAAASSSSSSLLLLLLLLLLLLLLLLMMMMMMMMEEEEEEEEERRRRRRRRRRRLLLLLLLLSSSSSSVVVVVVVDDDDDDDDYYYYYYYYYYYYGGGGKKKKKKKKKKKKKKKKKKSSSSSSKKKKKKKKKLLLLLLLLEEEEEEEEEFFFFFFFFFFFAAAAAIIIIIIIIYYYYYYYYYYYYPPPPPPPAAAAAPPPPPPPQQQQQQQQQVVVVVVVSSSSSSTTTTTTTAAAAAVVVVVVVVVVVVVVEEEEEEEEEPPPPPPPYYYYYYYYYYYYNNNNNNNNSSSSSSIIIIIIIILLLLLLLLTTTTTTTTTTTTTTHHHHHHHHHHTTTTTTTTTTTTTTLLLLLLLLEEEEEEEEEHHHHHHHHHHSSSSSSDDDDDDDDCCCCCCAAAAAFFFFFFFFFFFMMMMMMMMVVVVVVVDDDDDDDDNNNNNNNNEEEEEEEEEAAAAAIIIIIIIIYYYYYYYYYYYYDDDDDDDDIIIIIIIICCCCCCRRRRRRRRRRRRRRRRRRRRRRNNNNNNNNLLLLLLLLDDDDDDDDIIIIIIIIEEEEEEEEERRRRRRRRRRRPPPPPPPTTTTTTTYYYYYYYYYYYYTTTTTTTNNNNNNNNLLLLLLLLNNNNNNNNRRRRRRRRRRRLLLLLLLLIIIIIIIIGGGGQQQQQQQQQIIIIIIIIVVVVVVVSSSSSSSSSSSSIIIIIIIITTTTTTTAAAAASSSSSSLLLLLLLLRRRRRRRRRRRFFFFFFFFFFFDDDDDDDDGGGGAAAAALLLLLLLLNNNNNNNNVVVVVVVDDDDDDDDLLLLLLLLTTTTTTTEEEEEEEEEFFFFFFFFFFFQQQQQQQQQTTTTTTTNNNNNNNNLLLLLLLLVVVVVVVPPPPPPPYYYYYYYYYYYYPPPPPPPRRRRRRRRRRRIIIIIIIIHHHHHHHHHHFFFFFFFFFFFPPPPPPPLLLLLLLLAAAAATTTTTTTYYYYYYYYYYYYAAAAAPPPPPPPVVVVVVVIIIIIIIISSSSSSAAAAAEEEEEEEEEKKKKKKKKKAAAAAYYYYYYYYYYYYHHHHHHHHHHEEEEEEEEEQQQQQQQQQLLLLLLLLSSSSSSVVVVVVVAAAAAEEEEEEEEEIIIIIIIITTTTTTTNNNNNNNNAAAAACCCCCCFFFFFFFFFFFEEEEEEEEEPPPPPPPAAAAANNNNNNNNQQQQQQQQQMMMMMMMMVVVVVVVKKKKKKKKKCCCCCCDDDDDDDDPPPPPPPRRRRRRRRRRRHHHHHHHHHHGGGGKKKKKKKKKYYYYYYYYYYYYMMMMMMMMAAAAACCCCCCCCCCCCMMMMMMMMLLLLLLLLYYYYYYYYYYYYRRRRRRRRRRRGGGGDDDDDDDDVVVVVVVVVVVVVVPPPPPPPKKKKKKKKKDDDDDDDDVVVVVVVNNNNNNNNAAAAAAAAAAIIIIIIIIAAAAATTTTTTTIIIIIIIIKKKKKKKKKTTTTTTTKKKKKKKKKRRRRRRRRRRRTTTTTTTIIIIIIIIQQQQQQQQQFFFFFFFFFFFVVVVVVVDDDDDDDDWWWWWWWWWWWWWWCCCCCCPPPPPPPTTTTTTTGGGGFFFFFFFFFFFKKKKKKKKKVVVVVVVGGGGIIIIIIIINNNNNNNNYYYYYYYYYYYYQQQQQQQQQPPPPPPPPPPPPPPTTTTTTTVVVVVVVVVVVVVVPPPPPPPGGGGGGGGDDDDDDDDLLLLLLLLAAAAAKKKKKKKKKVVVVVVVQQQQQQQQQRRRRRRRRRRRAAAAAVVVVVVVCCCCCCMMMMMMMMLLLLLLLLSSSSSSNNNNNNNNTTTTTTTTTTTTTTAAAAAIIIIIIIIAAAAAEEEEEEEEEAAAAAWWWWWWWWWWWWWWAAAAARRRRRRRRRRRLLLLLLLLDDDDDDDDHHHHHHHHHHKKKKKKKKKFFFFFFFFFFFDDDDDDDDLLLLLLLLMMMMMMMMYYYYYYYYYYYYAAAAAKKKKKKKKKRRRRRRRRRRRAAAAAFFFFFFFFFFFVVVVVVVHHHHHHHHHHWWWWWWWWWWWWWWYYYYYYYYYYYYVVVVVVVGGGGEEEEEEEEEGGGGMMMMMMMMEEEEEEEEEEEEEEEEEEGGGGEEEEEEEEEFFFFFFFFFFFSSSSSSEEEEEEEEEAAAAARRRRRRRRRRREEEEEEEEEDDDDDDDDLLLLLLLLAAAAAAAAAALLLLLLLLEEEEEEEEEKKKKKKKKKDDDDDDDDYYYYYYYYYYYYEEEEEEEEEEEEEEEEEEVVVVVVVGGGGVVVVVVVDDDDDDDDSSSSSSVVVVVVVEEEEEEEEEAAAAAEEEEEEEEEAAAAAEEEEEEEEEEEEEEEEEEGGGGEEEEEEEEEEEEEEEEEEYYYYYYYYYYYYY

SEQ ID NO: 35 - protein, 3493 aa, Zea mays
MMMMMMMMRRRRRRRRRRREEEEEEEEECCCCCCIIIIIIIISSSSSSIIIIIIIIHHHHHHHHHHIIIIIIIIGGGGQQQQQQQQQAAAAAGGGGIIIIIIIIQQQQQQQQQVVVVVVVGGGGNNNNNNNNAAAAACCCCCCWWWWWWWWWWWWWWEEEEEEEEELLLLLLLLYYYYYYYYYYYYCCCCCCLLLLLLLLEEEEEEEEEHHHHHHHHHHGGGGIIIIIIIIQQQQQQQQQAAAAADDDDDDDDGGGGQQQQQQQQQMMMMMMMMPPPPPPPGGGGDDDDDDDDKKKKKKKKKTTTTTTTIIIIIIIIGGGGGGGGGGGGDDDDDDDDDDDDDDDDAAAAAFFFFFFFFFFFNNNNNNNNTTTTTTTFFFFFFFFFFFFFFFFFFFFFFSSSSSSEEEEEEEEETTTTTTTGGGGAAAAAGGGGKKKKKKKKKHHHHHHHHHHVVVVVVVPPPPPPPRRRRRRRRRRRAAAAAVVVVVVVFFFFFFFFFFFVVVVVVVDDDDDDDDLLLLLLLLEEEEEEEEEPPPPPPPTTTTTTTVVVVVVVIIIIIIIIDDDDDDDDEEEEEEEEEVVVVVVVRRRRRRRRRRRTTTTTTTGGGGTTTTTTTYYYYYYYYYYYYRRRRRRRRRRRQQQQQQQQQLLLLLLLLFFFFFFFFFFFHHHHHHHHHHPPPPPPPEEEEEEEEEQQQQQQQQQLLLLLLLLIIIIIIIISSSSSSGGGGKKKKKKKKKEEEEEEEEEDDDDDDDDAAAAAAAAAANNNNNNNNNNNNNNNNFFFFFFFFFFFAAAAARRRRRRRRRRRGGGGHHHHHHHHHHYYYYYYYYYYYYTTTTTTTIIIIIIIIGGGGKKKKKKKKKEEEEEEEEEIIIIIIIIVVVVVVVDDDDDDDDLLLLLLLLCCCCCCLLLLLLLLDDDDDDDDRRRRRRRRRRRIIIIIIIIRRRRRRRRRRRKKKKKKKKKLLLLLLLLAAAAADDDDDDDDNNNNNNNNCCCCCCTTTTTTTGGGGLLLLLLLLQQQQQQQQQGGGGFFFFFFFFFFFLLLLLLLLVVVVVVVFFFFFFFFFFFNNNNNNNNAAAAAVVVVVVVGGGGGGGGGGGGTTTTTTTGGGGSSSSSSGGGGLLLLLLLLGGGGSSSSSSLLLLLLLLLLLLLLLLLLLLLLLLEEEEEEEEERRRRRRRRRRRLLLLLLLLSSSSSSVVVVVVVDDDDDDDDYYYYYYYYYYYYGGGGKKKKKKKKKKKKKKKKKKSSSSSSKKKKKKKKKLLLLLLLLGGGGFFFFFFFFFFFTTTTTTTVVVVVVVYYYYYYYYYYYYPPPPPPPSSSSSSPPPPPPPQQQQQQQQQVVVVVVVSSSSSSTTTTTTTSSSSSSVVVVVVVVVVVVVVEEEEEEEEEPPPPPPPYYYYYYYYYYYYNNNNNNNNSSSSSSVVVVVVVLLLLLLLLSSSSSSTTTTTTTHHHHHHHHHHSSSSSSLLLLLLLLLLLLLLLLEEEEEEEEEHHHHHHHHHHTTTTTTTDDDDDDDDVVVVVVVAAAAAIIIIIIIILLLLLLLLLLLLLLLLDDDDDDDDNNNNNNNNEEEEEEEEEAAAAAIIIIIIIIYYYYYYYYYYYYDDDDDDDDIIIIIIIICCCCCCRRRRRRRRRRRRRRRRRRRRRRSSSSSSLLLLLLLLDDDDDDDDIIIIIIIIEEEEEEEEERRRRRRRRRRRPPPPPPPTTTTTTTYYYYYYYYYYYYTTTTTTTNNNNNNNNLLLLLLLLNNNNNNNNRRRRRRRRRRRLLLLLLLLVVVVVVVSSSSSSQQQQQQQQQVVVVVVVIIIIIIIISSSSSSSSSSSSLLLLLLLLTTTTTTTAAAAASSSSSSLLLLLLLLRRRRRRRRRRRFFFFFFFFFFFDDDDDDDDGGGGAAAAALLLLLLLLNNNNNNNNVVVVVVVDDDDDDDDVVVVVVVNNNNNNNNEEEEEEEEEFFFFFFFFFFFQQQQQQQQQTTTTTTTNNNNNNNNLLLLLLLLVVVVVVVPPPPPPPYYYYYYYYYYYYPPPPPPPRRRRRRRRRRRIIIIIIIIHHHHHHHHHHFFFFFFFFFFFMMMMMMMMLLLLLLLLSSSSSSSSSSSSYYYYYYYYYYYYAAAAAPPPPPPPVVVVVVVIIIIIIIISSSSSSAAAAAEEEEEEEEEKKKKKKKKKAAAAAYYYYYYYYYYYYHHHHHHHHHHEEEEEEEEEQQQQQQQQQLLLLLLLLSSSSSSVVVVVVVAAAAAEEEEEEEEEIIIIIIIITTTTTTTNNNNNNNNSSSSSSAAAAAFFFFFFFFFFFEEEEEEEEEPPPPPPPSSSSSSSSSSSSMMMMMMMMMMMMMMMMAAAAAKKKKKKKKKCCCCCCDDDDDDDDPPPPPPPRRRRRRRRRRRHHHHHHHHHHGGGGKKKKKKKKKYYYYYYYYYYYYMMMMMMMMAAAAACCCCCCCCCCCCLLLLLLLLMMMMMMMMYYYYYYYYYYYYRRRRRRRRRRRGGGGDDDDDDDDVVVVVVVVVVVVVVPPPPPPPKKKKKKKKKDDDDDDDDVVVVVVVNNNNNNNNAAAAAAAAAAVVVVVVVAAAAATTTTTTTIIIIIIIIKKKKKKKKKTTTTTTTKKKKKKKKKRRRRRRRRRRRTTTTTTTIIIIIIIIQQQQQQQQQFFFFFFFFFFFVVVVVVVDDDDDDDDWWWWWWWWWWWWWWCCCCCCPPPPPPPTTTTTTTGGGGFFFFFFFFFFFKKKKKKKKKCCCCCCGGGGIIIIIIIINNNNNNNNYYYYYYYYYYYYQQQQQQQQQPPPPPPPPPPPPPPSSSSSSVVVVVVVVVVVVVVPPPPPPPGGGGGGGGDDDDDDDDLLLLLLLLAAAAAKKKKKKKKKVVVVVVVQQQQQQQQQRRRRRRRRRRRAAAAAVVVVVVVCCCCCCMMMMMMMMIIIIIIIISSSSSSNNNNNNNNSSSSSSTTTTTTTSSSSSSVVVVVVVVVVVVVVEEEEEEEEEVVVVVVVFFFFFFFFFFFSSSSSSRRRRRRRRRRRIIIIIIIIDDDDDDDDHHHHHHHHHHKKKKKKKKKFFFFFFFFFFFDDDDDDDDLLLLLLLLMMMMMMMMYYYYYYYYYYYYAAAAAKKKKKKKKKRRRRRRRRRRRAAAAAFFFFFFFFFFFVVVVVVVHHHHHHHHHHWWWWWWWWWWWWWWYYYYYYYYYYYYVVVVVVVGGGGEEEEEEEEEGGGGMMMMMMMMEEEEEEEEEEEEEEEEEEGGGGEEEEEEEEEFFFFFFFFFFFSSSSSSEEEEEEEEEAAAAARRRRRRRRRRREEEEEEEEEDDDDDDDDLLLLLLLLAAAAAAAAAALLLLLLLLEEEEEEEEEKKKKKKKKKDDDDDDDDYYYYYYYYYYYYEEEEEEEEEEEEEEEEEEVVVVVVVGGGGAAAAAEEEEEEEEEFFFFFFFFFFFDDDDDDDDEEEEEEEEEGGGGEEEEEEEEEEEEEEEEEEGGGGDDDDDDDDDDDDDDDDGGGGDDDDDDDDEEEEEEEEEYYYYYYYYYYYYY

SEQ ID NO: 36 - protein, 3526 aa, Mus musculus
MMMMMMMMRRRRRRRRRRREEEEEEEEECCCCCCIIIIIIIISSSSSSIIIIIIIIHHHHHHHHHHVVVVVVVGGGGQQQQQQQQQAAAAAGGGGVVVVVVVQQQQQQQQQIIIIIIIIGGGGNNNNNNNNAAAAACCCCCCWWWWWWWWWWWWWWEEEEEEEEELLLLLLLLYYYYYYYYYYYYCCCCCCLLLLLLLLEEEEEEEEEHHHHHHHHHHGGGGIIIIIIIIQQQQQQQQQPPPPPPPDDDDDDDDGGGGQQQQQQQQQMMMMMMMMPPPPPPPSSSSSSDDDDDDDDKKKKKKKKKTTTTTTTIIIIIIIIGGGGGGGGGGGGDDDDDDDDDDDDDDDDSSSSSSFFFFFFFFFFFNNNNNNNNTTTTTTTFFFFFFFFFFFFFFFFFFFFFFSSSSSSEEEEEEEEETTTTTTTGGGGAAAAAGGGGKKKKKKKKKHHHHHHHHHHVVVVVVVPPPPPPPRRRRRRRRRRRAAAAAVVVVVVVFFFFFFFFFFFVVVVVVVDDDDDDDDLLLLLLLLEEEEEEEEEPPPPPPPTTTTTTTVVVVVVVIIIIIIIIDDDDDDDDEEEEEEEEEVVVVVVVRRRRRRRRRRRTTTTTTTGGGGTTTTTTTYYYYYYYYYYYYRRRRRRRRRRRQQQQQQQQQLLLLLLLLFFFFFFFFFFFHHHHHHHHHHPPPPPPPEEEEEEEEEQQQQQQQQQLLLLLLLLIIIIIIIITTTTTTTGGGGKKKKKKKKKEEEEEEEEEDDDDDDDDAAAAAAAAAANNNNNNNNNNNNNNNNYYYYYYYYYYYYAAAAARRRRRRRRRRRGGGGHHHHHHHHHHYYYYYYYYYYYYTTTTTTTIIIIIIIIGGGGKKKKKKKKKEEEEEEEEEIIIIIIIIIIIIIIIIDDDDDDDDLLLLLLLLVVVVVVVLLLLLLLLDDDDDDDDRRRRRRRRRRRIIIIIIIIRRRRRRRRRRRKKKKKKKKKLLLLLLLLAAAAADDDDDDDDQQQQQQQQQCCCCCCTTTTTTTGGGGLLLLLLLLQQQQQQQQQGGGGFFFFFFFFFFFLLLLLLLLVVVVVVVFFFFFFFFFFFHHHHHHHHHHSSSSSSFFFFFFFFFFFGGGGGGGGGGGGTTTTTTTGGGGSSSSSSGGGGFFFFFFFFFFFTTTTTTTSSSSSSLLLLLLLLLLLLLLLLMMMMMMMMEEEEEEEEERRRRRRRRRRRLLLLLLLLSSSSSSVVVVVVVDDDDDDDDYYYYYYYYYYYYGGGGKKKKKKKKKKKKKKKKKKSSSSSSKKKKKKKKKLLLLLLLLEEEEEEEEEFFFFFFFFFFFSSSSSSIIIIIIIIYYYYYYYYYYYYPPPPPPPAAAAAPPPPPPPQQQQQQQQQVVVVVVVSSSSSSTTTTTTTAAAAAVVVVVVVVVVVVVVEEEEEEEEEPPPPPPPYYYYYYYYYYYYNNNNNNNNSSSSSSIIIIIIIILLLLLLLLTTTTTTTTTTTTTTHHHHHHHHHHTTTTTTTTTTTTTTLLLLLLLLEEEEEEEEEHHHHHHHHHHSSSSSSDDDDDDDDCCCCCCAAAAAFFFFFFFFFFFMMMMMMMMVVVVVVVDDDDDDDDNNNNNNNNEEEEEEEEEAAAAAIIIIIIIIYYYYYYYYYYYYDDDDDDDDIIIIIIIICCCCCCRRRRRRRRRRRRRRRRRRRRRRNNNNNNNNLLLLLLLLDDDDDDDDIIIIIIIIEEEEEEEEERRRRRRRRRRRPPPPPPPTTTTTTTYYYYYYYYYYYYTTTTTTTNNNNNNNNLLLLLLLLNNNNNNNNRRRRRRRRRRRLLLLLLLLIIIIIIIISSSSSSQQQQQQQQQIIIIIIIIVVVVVVVSSSSSSSSSSSSIIIIIIIITTTTTTTAAAAASSSSSSLLLLLLLLRRRRRRRRRRRFFFFFFFFFFFDDDDDDDDGGGGAAAAALLLLLLLLNNNNNNNNVVVVVVVDDDDDDDDLLLLLLLLTTTTTTTEEEEEEEEEFFFFFFFFFFFQQQQQQQQQTTTTTTTNNNNNNNNLLLLLLLLVVVVVVVPPPPPPPYYYYYYYYYYYYPPPPPPPRRRRRRRRRRRIIIIIIIIHHHHHHHHHHFFFFFFFFFFFPPPPPPPLLLLLLLLAAAAATTTTTTTYYYYYYYYYYYYAAAAAPPPPPPPVVVVVVVIIIIIIIISSSSSSAAAAAEEEEEEEEEKKKKKKKKKAAAAAYYYYYYYYYYYYHHHHHHHHHHEEEEEEEEEQQQQQQQQQLLLLLLLLSSSSSSVVVVVVVAAAAAEEEEEEEEEIIIIIIIITTTTTTTNNNNNNNNAAAAACCCCCCFFFFFFFFFFFEEEEEEEEEPPPPPPPAAAAANNNNNNNNQQQQQQQQQMMMMMMMMVVVVVVVKKKKKKKKKCCCCCCDDDDDDDDPPPPPPPRRRRRRRRRRRHHHHHHHHHHGGGGKKKKKKKKKYYYYYYYYYYYYMMMMMMMMAAAAACCCCCCCCCCCCLLLLLLLLLLLLLLLLYYYYYYYYYYYYRRRRRRRRRRRGGGGDDDDDDDDVVVVVVVVVVVVVVPPPPPPPKKKKKKKKKDDDDDDDDVVVVVVVNNNNNNNNAAAAAAAAAAIIIIIIIIAAAAATTTTTTTIIIIIIIIKKKKKKKKKTTTTTTTKKKKKKKKKRRRRRRRRRRRTTTTTTTIIIIIIIIQQQQQQQQQFFFFFFFFFFFVVVVVVVDDDDDDDDWWWWWWWWWWWWWWCCCCCCPPPPPPPTTTTTTTGGGGFFFFFFFFFFFKKKKKKKKKVVVVVVVGGGGIIIIIIIINNNNNNNNYYYYYYYYYYYYQQQQQQQQQPPPPPPPPPPPPPPTTTTTTTVVVVVVVVVVVVVVPPPPPPPGGGGGGGGDDDDDDDDLLLLLLLLAAAAAKKKKKKKKKVVVVVVVQQQQQQQQQRRRRRRRRRRRAAAAAVVVVVVVCCCCCCMMMMMMMMLLLLLLLLSSSSSSNNNNNNNNTTTTTTTTTTTTTTAAAAAIIIIIIIIAAAAAEEEEEEEEEAAAAAWWWWWWWWWWWWWWAAAAARRRRRRRRRRRLLLLLLLLDDDDDDDDHHHHHHHHHHKKKKKKKKKFFFFFFFFFFFDDDDDDDDLLLLLLLLMMMMMMMMYYYYYYYYYYYYAAAAAKKKKKKKKKRRRRRRRRRRRAAAAAFFFFFFFFFFFVVVVVVVHHHHHHHHHHWWWWWWWWWWWWWWYYYYYYYYYYYYVVVVVVVGGGGEEEEEEEEEGGGGMMMMMMMMEEEEEEEEEEEEEEEEEEGGGGEEEEEEEEEFFFFFFFFFFFSSSSSSEEEEEEEEEAAAAARRRRRRRRRRREEEEEEEEEDDDDDDDDMMMMMMMMAAAAAAAAAALLLLLLLLEEEEEEEEEKKKKKKKKKDDDDDDDDYYYYYYYYYYYYEEEEEEEEEEEEEEEEEEVVVVVVVGGGGVVVVVVVDDDDDDDDSSSSSSVVVVVVVEEEEEEEEEGGGGEEEEEEEEEGGGGEEEEEEEEEEEEEEEEEEEEEEEEEEEGGGGEEEEEEEEEEEEEEEEEEYYYYYYYYYYYYY

SEQ ID NO: 37 - protein, 3529 aa, Neurospora crassa
MMMMMMMMRRRRRRRRRRREEEEEEEEEIIIIIIIIIIIIIIIISSSSSSLLLLLLLLNNNNNNNNVVVVVVVGGGGQQQQQQQQQAAAAAGGGGCCCCCCQQQQQQQQQIIIIIIIIAAAAANNNNNNNNSSSSSSCCCCCCWWWWWWWWWWWWWWEEEEEEEEELLLLLLLLYYYYYYYYYYYYCCCCCCLLLLLLLLEEEEEEEEEHHHHHHHHHHGGGGIIIIIIIIQQQQQQQQQPPPPPPPDDDDDDDDGGGGYYYYYYYYYYYYLLLLLLLLTTTTTTTEEEEEEEEEEEEEEEEEERRRRRRRRRRRKKKKKKKKKAAAAAAAAAADDDDDDDDPPPPPPPDDDDDDDDHHHHHHHHHHGGGGFFFFFFFFFFFSSSSSSTTTTTTTFFFFFFFFFFFFFFFFFFFFFFSSSSSSEEEEEEEEETTTTTTTGGGGNNNNNNNNGGGGNNNNNNNNTTTTTTTFFFFFFFFFFFPPPPPPPRRRRRRRRRRRTTTTTTTIIIIIIIIYYYYYYYYYYYYAAAAADDDDDDDDLLLLLLLLEEEEEEEEEPPPPPPPNNNNNNNNVVVVVVVIIIIIIIIDDDDDDDDEEEEEEEEEVVVVVVVRRRRRRRRRRRTTTTTTTGGGGAAAAAYYYYYYYYYYYYRRRRRRRRRRRGGGGLLLLLLLLFFFFFFFFFFFHHHHHHHHHHPPPPPPPEEEEEEEEEHHHHHHHHHHMMMMMMMMIIIIIIIISSSSSSGGGGKKKKKKKKKEEEEEEEEEDDDDDDDDAAAAASSSSSSNNNNNNNNNNNNNNNNYYYYYYYYYYYYAAAAARRRRRRRRRRRGGGGHHHHHHHHHHYYYYYYYYYYYYTTTTTTTVVVVVVVGGGGKKKKKKKKKEEEEEEEEELLLLLLLLIIIIIIIIDDDDDDDDQQQQQQQQQVVVVVVVLLLLLLLLDDDDDDDDKKKKKKKKKVVVVVVVRRRRRRRRRRRRRRRRRRRRRRVVVVVVVAAAAADDDDDDDDNNNNNNNNCCCCCCSSSSSSGGGGLLLLLLLLQQQQQQQQQGGGGFFFFFFFFFFFLLLLLLLLVVVVVVVFFFFFFFFFFFHHHHHHHHHHSSSSSSFFFFFFFFFFFGGGGGGGGGGGGTTTTTTTGGGGSSSSSSGGGGFFFFFFFFFFFGGGGAAAAALLLLLLLLLLLLLLLLMMMMMMMMEEEEEEEEERRRRRRRRRRRLLLLLLLLSSSSSSVVVVVVVDDDDDDDDYYYYYYYYYYYYGGGGKKKKKKKKKKKKKKKKKKSSSSSSKKKKKKKKKLLLLLLLLEEEEEEEEEFFFFFFFFFFFCCCCCCVVVVVVVYYYYYYYYYYYYPPPPPPPAAAAAPPPPPPPQQQQQQQQQTTTTTTTAAAAATTTTTTTSSSSSSVVVVVVVVVVVVVVEEEEEEEEEPPPPPPPYYYYYYYYYYYYNNNNNNNNSSSSSSIIIIIIIILLLLLLLLTTTTTTTTTTTTTTHHHHHHHHHHTTTTTTTTTTTTTTLLLLLLLLEEEEEEEEEQQQQQQQQQRRRRRRRRRRRRRRRRRRRRRRDDDDDDDDCCCCCCSSSSSSFFFFFFFFFFFMMMMMMMMVVVVVVVDDDDDDDDNNNNNNNNEEEEEEEEEAAAAAIIIIIIIIYYYYYYYYYYYYDDDDDDDDIIIIIIIICCCCCCRRRRRRRRRRRRRRRRRRRRRRNNNNNNNNLLLLLLLLGGGGLLLLLLLLEEEEEEEEERRRRRRRRRRRPPPPPPPNNNNNNNNYYYYYYYYYYYYEEEEEEEEENNNNNNNNLLLLLLLLNNNNNNNNRRRRRRRRRRRLLLLLLLLIIIIIIIIAAAAAQQQQQQQQQVVVVVVVVVVVVVVSSSSSSSSSSSSIIIIIIIITTTTTTTAAAAASSSSSSLLLLLLLLRRRRRRRRRRRFFFFFFFFFFFDDDDDDDDGGGGSSSSSSLLLLLLLLNNNNNNNNVVVVVVVDDDDDDDDLLLLLLLLNNNNNNNNEEEEEEEEEFFFFFFFFFFFQQQQQQQQQTTTTTTTNNNNNNNNLLLLLLLLVVVVVVVPPPPPPPYYYYYYYYYYYYPPPPPPPRRRRRRRRRRRIIIIIIIIHHHHHHHHHHFFFFFFFFFFFPPPPPPPLLLLLLLLVVVVVVVAAAAAYYYYYYYYYYYYAAAAAPPPPPPPVVVVVVVIIIIIIIISSSSSSAAAAAAAAAAKKKKKKKKKAAAAAAAAAAHHHHHHHHHHEEEEEEEEEAAAAANNNNNNNNSSSSSSVVVVVVVQQQQQQQQQEEEEEEEEEMMMMMMMMTTTTTTTMMMMMMMMSSSSSSCCCCCCFFFFFFFFFFFEEEEEEEEEPPPPPPPNNNNNNNNNNNNNNNNQQQQQQQQQMMMMMMMMVVVVVVVKKKKKKKKKCCCCCCDDDDDDDDPPPPPPPRRRRRRRRRRRHHHHHHHHHHGGGGKKKKKKKKKYYYYYYYYYYYYMMMMMMMMAAAAATTTTTTTCCCCCCLLLLLLLLLLLLLLLLYYYYYYYYYYYYRRRRRRRRRRRGGGGDDDDDDDDVVVVVVVVVVVVVVPPPPPPPNNNNNNNNDDDDDDDDAAAAAHHHHHHHHHHAAAAAAAAAAVVVVVVVAAAAATTTTTTTLLLLLLLLKKKKKKKKKTTTTTTTKKKKKKKKKRRRRRRRRRRRTTTTTTTIIIIIIIIQQQQQQQQQFFFFFFFFFFFVVVVVVVDDDDDDDDWWWWWWWWWWWWWWCCCCCCPPPPPPPTTTTTTTGGGGFFFFFFFFFFFKKKKKKKKKLLLLLLLLGGGGIIIIIIIICCCCCCYYYYYYYYYYYYQQQQQQQQQPPPPPPPPPPPPPPHHHHHHHHHHQQQQQQQQQVVVVVVVPPPPPPPNNNNNNNNGGGGRRRRRRRRRRRSSSSSSGGGGPPPPPPPRRRRRRRRRRRLLLLLLLLTTTTTTTDDDDDDDDAAAAAVVVVVVVCCCCCCMMMMMMMMLLLLLLLLSSSSSSNNNNNNNNTTTTTTTTTTTTTTAAAAAIIIIIIIIAAAAAEEEEEEEEEAAAAAWWWWWWWWWWWWWWSSSSSSAAAAASSSSSSFFFFFFFFFFFVVVVVVVQQQQQQQQQVVVVVVVDDDDDDDDLLLLLLLLMMMMMMMMYYYYYYYYYYYYSSSSSSKKKKKKKKKRRRRRRRRRRRAAAAAFFFFFFFFFFFVVVVVVVHHHHHHHHHHWWWWWWWWWWWWWWYYYYYYYYYYYYVVVVVVVGGGGEEEEEEEEEGGGGMMMMMMMMEEEEEEEEEEEEEEEEEEGGGGEEEEEEEEEFFFFFFFFFFFSSSSSSEEEEEEEEEAAAAARRRRRRRRRRREEEEEEEEEDDDDDDDDLLLLLLLLAAAAAAAAAALLLLLLLLEEEEEEEEERRRRRRRRRRRDDDDDDDDYYYYYYYYYYYYEEEEEEEEEEEEEEEEEEVVVVVVVAAAAAAAAAADDDDDDDDSSSSSSMMMMMMMMEEEEEEEEEGGGGEEEEEEEEEDDDDDDDDVVVVVVVEEEEEEEEEAAAAAEEEEEEEEEYYYYYYYYYYYYY

SEQ ID NO: 38 - protein, 3528 aa, Patella vulgata
MMMMMMMMRRRRRRRRRRREEEEEEEEECCCCCCIIIIIIIISSSSSSVVVVVVVHHHHHHHHHHIIIIIIIIGGGGQQQQQQQQQAAAAAGGGGVVVVVVVQQQQQQQQQMMMMMMMMGGGGNNNNNNNNAAAAACCCCCCWWWWWWWWWWWWWWEEEEEEEEELLLLLLLLYYYYYYYYYYYYCCCCCCLLLLLLLLEEEEEEEEEHHHHHHHHHHGGGGIIIIIIIIQQQQQQQQQPPPPPPPDDDDDDDDGGGGQQQQQQQQQMMMMMMMMPPPPPPPSSSSSSDDDDDDDDKKKKKKKKKTTTTTTTIIIIIIIIGGGGGGGGGGGGDDDDDDDDDDDDDDDDSSSSSSFFFFFFFFFFFNNNNNNNNTTTTTTTFFFFFFFFFFFFFFFFFFFFFFSSSSSSEEEEEEEEETTTTTTTGGGGAAAAAGGGGKKKKKKKKKHHHHHHHHHHVVVVVVVPPPPPPPRRRRRRRRRRRAAAAAVVVVVVVFFFFFFFFFFFVVVVVVVDDDDDDDDLLLLLLLLEEEEEEEEEPPPPPPPTTTTTTTVVVVVVVVVVVVVVDDDDDDDDEEEEEEEEEVVVVVVVRRRRRRRRRRRTTTTTTTGGGGTTTTTTTYYYYYYYYYYYYRRRRRRRRRRRQQQQQQQQQLLLLLLLLFFFFFFFFFFFHHHHHHHHHHPPPPPPPEEEEEEEEEQQQQQQQQQLLLLLLLLIIIIIIIITTTTTTTGGGGKKKKKKKKKEEEEEEEEEDDDDDDDDAAAAAAAAAANNNNNNNNNNNNNNNNYYYYYYYYYYYYAAAAARRRRRRRRRRRGGGGHHHHHHHHHHYYYYYYYYYYYYTTTTTTTVVVVVVVGGGGKKKKKKKKKEEEEEEEEEIIIIIIIIIIIIIIIIDDDDDDDDLLLLLLLLVVVVVVVLLLLLLLLDDDDDDDDRRRRRRRRRRRIIIIIIIIRRRRRRRRRRRKKKKKKKKKLLLLLLLLAAAAADDDDDDDDQQQQQQQQQCCCCCCTTTTTTTGGGGLLLLLLLLQQQQQQQQQGGGGFFFFFFFFFFFLLLLLLLLIIIIIIIIFFFFFFFFFFFHHHHHHHHHHSSSSSSFFFFFFFFFFFGGGGGGGGGGGGTTTTTTTGGGGSSSSSSGGGGFFFFFFFFFFFSSSSSSSSSSSSLLLLLLLLLLLLLLLLMMMMMMMMEEEEEEEEERRRRRRRRRRRLLLLLLLLSSSSSSVVVVVVVDDDDDDDDYYYYYYYYYYYYGGGGKKKKKKKKKKKKKKKKKKSSSSSSKKKKKKKKKLLLLLLLLEEEEEEEEEFFFFFFFFFFFAAAAAIIIIIIIIYYYYYYYYYYYYPPPPPPPAAAAAPPPPPPPQQQQQQQQQIIIIIIIISSSSSSTTTTTTTAAAAAVVVVVVVVVVVVVVEEEEEEEEEPPPPPPPYYYYYYYYYYYYNNNNNNNNSSSSSSIIIIIIIILLLLLLLLTTTTTTTTTTTTTTHHHHHHHHHHTTTTTTTTTTTTTTLLLLLLLLEEEEEEEEEHHHHHHHHHHSSSSSSDDDDDDDDCCCCCCAAAAAFFFFFFFFFFFMMMMMMMMVVVVVVVDDDDDDDDNNNNNNNNEEEEEEEEEAAAAAIIIIIIIIYYYYYYYYYYYYDDDDDDDDIIIIIIIICCCCCCRRRRRRRRRRRRRRRRRRRRRRNNNNNNNNLLLLLLLLDDDDDDDDIIIIIIIIEEEEEEEEERRRRRRRRRRRPPPPPPPTTTTTTTYYYYYYYYYYYYTTTTTTTNNNNNNNNLLLLLLLLNNNNNNNNRRRRRRRRRRRLLLLLLLLIIIIIIIIGGGGQQQQQQQQQIIIIIIIIVVVVVVVSSSSSSSSSSSSIIIIIIIITTTTTTTAAAAASSSSSSLLLLLLLLRRRRRRRRRRRFFFFFFFFFFFDDDDDDDDGGGGAAAAALLLLLLLLNNNNNNNNVVVVVVVDDDDDDDDLLLLLLLLTTTTTTTEEEEEEEEEFFFFFFFFFFFQQQQQQQQQTTTTTTTNNNNNNNNLLLLLLLLVVVVVVVPPPPPPPYYYYYYYYYYYYPPPPPPPRRRRRRRRRRRIIIIIIIIHHHHHHHHHHFFFFFFFFFFFPPPPPPPLLLLLLLLAAAAATTTTTTTYYYYYYYYYYYYAAAAAPPPPPPPVVVVVVVIIIIIIIISSSSSSAAAAAEEEEEEEEEKKKKKKKKKAAAAAYYYYYYYYYYYYHHHHHHHHHHEEEEEEEEEQQQQQQQQQLLLLLLLLTTTTTTTVVVVVVVAAAAAEEEEEEEEEIIIIIIIITTTTTTTNNNNNNNNAAAAACCCCCCFFFFFFFFFFFEEEEEEEEEPPPPPPPAAAAANNNNNNNNQQQQQQQQQMMMMMMMMVVVVVVVKKKKKKKKKCCCCCCDDDDDDDDPPPPPPPRRRRRRRRRRRHHHHHHHHHHGGGGKKKKKKKKKYYYYYYYYYYYYMMMMMMMMSSSSSSCCCCCCCCCCCCMMMMMMMMLLLLLLLLYYYYYYYYYYYYRRRRRRRRRRRGGGGDDDDDDDDVVVVVVVVVVVVVVPPPPPPPKKKKKKKKKDDDDDDDDVVVVVVVNNNNNNNNAAAAAAAAAAIIIIIIIIAAAAATTTTTTTIIIIIIIIKKKKKKKKKTTTTTTTKKKKKKKKKRRRRRRRRRRRTTTTTTTIIIIIIIIQQQQQQQQQFFFFFFFFFFFVVVVVVVDDDDDDDDWWWWWWWWWWWWWWCCCCCCPPPPPPPTTTTTTTGGGGFFFFFFFFFFFKKKKKKKKKVVVVVVVGGGGIIIIIIIINNNNNNNNYYYYYYYYYYYYQQQQQQQQQPPPPPPPPPPPPPPTTTTTTTVVVVVVVVVVVVVVPPPPPPPGGGGGGGGDDDDDDDDLLLLLLLLAAAAAKKKKKKKKKVVVVVVVQQQQQQQQQRRRRRRRRRRRAAAAAVVVVVVVCCCCCCMMMMMMMMLLLLLLLLSSSSSSNNNNNNNNTTTTTTTTTTTTTTAAAAAIIIIIIIIAAAAAEEEEEEEEEAAAAAWWWWWWWWWWWWWWAAAAARRRRRRRRRRRLLLLLLLLDDDDDDDDHHHHHHHHHHKKKKKKKKKFFFFFFFFFFFDDDDDDDDLLLLLLLLMMMMMMMMYYYYYYYYYYYYAAAAAKKKKKKKKKRRRRRRRRRRRAAAAAFFFFFFFFFFFVVVVVVVHHHHHHHHHHWWWWWWWWWWWWWWYYYYYYYYYYYYVVVVVVVGGGGEEEEEEEEEGGGGMMMMMMMMEEEEEEEEEEEEEEEEEEGGGGEEEEEEEEEFFFFFFFFFFFSSSSSSEEEEEEEEEAAAAARRRRRRRRRRREEEEEEEEEDDDDDDDDLLLLLLLLAAAAAAAAAALLLLLLLLEEEEEEEEEKKKKKKKKKDDDDDDDDYYYYYYYYYYYYEEEEEEEEEEEEEEEEEEVVVVVVVGGGGVVVVVVVDDDDDDDDSSSSSSVVVVVVVEEEEEEEEEGGGGEEEEEEEEEGGGGEEEEEEEEEEEEEEEEEEEEEEEEEEEGGGGGGGGEEEEEEEEEEEEEEEEEEYYYYYYYYYYYYY

SEQ ID NO: 39 - protein, 3508 aa, Pelvetia fastigiata
MMMMMMMMRRRRRRRRRRREEEEEEEEECCCCCCIIIIIIIISSSSSSIIIIIIIIHHHHHHHHHHIIIIIIIIGGGGQQQQQQQQQAAAAAGGGGIIIIIIIIQQQQQQQQQTTTTTTTGGGGNNNNNNNNAAAAACCCCCCWWWWWWWWWWWWWWEEEEEEEEELLLLLLLLYYYYYYYYYYYYCCCCCCLLLLLLLLEEEEEEEEEHHHHHHHHHHGGGGIIIIIIIIQQQQQQQQQPPPPPPPDDDDDDDDGGGGQQQQQQQQQMMMMMMMMPPPPPPPSSSSSSDDDDDDDDKKKKKKKKKTTTTTTTIIIIIIIIGGGGGGGGGGGGDDDDDDDDDDDDDDDDAAAAAFFFFFFFFFFFNNNNNNNNTTTTTTTFFFFFFFFFFFFFFFFFFFFFFSSSSSSEEEEEEEEETTTTTTTGGGGAAAAAGGGGKKKKKKKKKHHHHHHHHHHVVVVVVVPPPPPPPRRRRRRRRRRRAAAAAVVVVVVVYYYYYYYYYYYYVVVVVVVDDDDDDDDLLLLLLLLEEEEEEEEEPPPPPPPTTTTTTTVVVVVVVCCCCCCDDDDDDDDEEEEEEEEEVVVVVVVRRRRRRRRRRRTTTTTTTGGGGTTTTTTTYYYYYYYYYYYYRRRRRRRRRRRQQQQQQQQQLLLLLLLLYYYYYYYYYYYYHHHHHHHHHHPPPPPPPEEEEEEEEEQQQQQQQQQIIIIIIIIIIIIIIIISSSSSSGGGGKKKKKKKKKEEEEEEEEEDDDDDDDDAAAAAAAAAANNNNNNNNNNNNNNNNYYYYYYYYYYYYAAAAARRRRRRRRRRRGGGGHHHHHHHHHHYYYYYYYYYYYYTTTTTTTIIIIIIIIGGGGKKKKKKKKKEEEEEEEEEIIIIIIIIVVVVVVVDDDDDDDDLLLLLLLLVVVVVVVLLLLLLLLDDDDDDDDRRRRRRRRRRRIIIIIIIIRRRRRRRRRRRKKKKKKKKKLLLLLLLLAAAAADDDDDDDDNNNNNNNNCCCCCCTTTTTTTGGGGLLLLLLLLQQQQQQQQQGGGGFFFFFFFFFFFLLLLLLLLVVVVVVVFFFFFFFFFFFHHHHHHHHHHAAAAATTTTTTTGGGGGGGGGGGGTTTTTTTGGGGSSSSSSGGGGLLLLLLLLGGGGSSSSSSLLLLLLLLLLLLLLLLLLLLLLLLEEEEEEEEERRRRRRRRRRRLLLLLLLLSSSSSSVVVVVVVDDDDDDDDYYYYYYYYYYYYGGGGRRRRRRRRRRRKKKKKKKKKSSSSSSKKKKKKKKKLLLLLLLLSSSSSSFFFFFFFFFFFAAAAAIIIIIIIITTTTTTTPPPPPPPAAAAAPPPPPPPQQQQQQQQQVVVVVVVAAAAATTTTTTTAAAAAVVVVVVVVVVVVVVEEEEEEEEEPPPPPPPYYYYYYYYYYYYNNNNNNNNSSSSSSVVVVVVVLLLLLLLLSSSSSSTTTTTTTHHHHHHHHHHAAAAALLLLLLLLLLLLLLLLEEEEEEEEEHHHHHHHHHHTTTTTTTDDDDDDDDCCCCCCTTTTTTTFFFFFFFFFFFCCCCCCLLLLLLLLDDDDDDDDNNNNNNNNEEEEEEEEEAAAAALLLLLLLLYYYYYYYYYYYYDDDDDDDDVVVVVVVCCCCCCRRRRRRRRRRRRRRRRRRRRRRNNNNNNNNLLLLLLLLDDDDDDDDIIIIIIIIEEEEEEEEERRRRRRRRRRRPPPPPPPTTTTTTTYYYYYYYYYYYYTTTTTTTNNNNNNNNLLLLLLLLNNNNNNNNRRRRRRRRRRRLLLLLLLLVVVVVVVAAAAAQQQQQQQQQVVVVVVVIIIIIIIISSSSSSSSSSSSLLLLLLLLTTTTTTTAAAAASSSSSSLLLLLLLLRRRRRRRRRRRFFFFFFFFFFFDDDDDDDDGGGGAAAAALLLLLLLLNNNNNNNNVVVVVVVDDDDDDDDVVVVVVVTTTTTTTEEEEEEEEEFFFFFFFFFFFQQQQQQQQQTTTTTTTNNNNNNNNLLLLLLLLVVVVVVVPPPPPPPYYYYYYYYYYYYPPPPPPPRRRRRRRRRRRIIIIIIIIHHHHHHHHHHFFFFFFFFFFFMMMMMMMMLLLLLLLLTTTTTTTSSSSSSYYYYYYYYYYYYAAAAAPPPPPPPIIIIIIIIIIIIIIIISSSSSSAAAAAEEEEEEEEEKKKKKKKKKAAAAAYYYYYYYYYYYYHHHHHHHHHHEEEEEEEEEQQQQQQQQQLLLLLLLLSSSSSSVVVVVVVAAAAAEEEEEEEEEIIIIIIIITTTTTTTNNNNNNNNSSSSSSVVVVVVVFFFFFFFFFFFEEEEEEEEEPPPPPPPAAAAAGGGGMMMMMMMMMMMMMMMMTTTTTTTNNNNNNNNCCCCCCDDDDDDDDPPPPPPPRRRRRRRRRRRHHHHHHHHHHGGGGKKKKKKKKKYYYYYYYYYYYYMMMMMMMMAAAAACCCCCCCCCCCCLLLLLLLLMMMMMMMMYYYYYYYYYYYYRRRRRRRRRRRGGGGDDDDDDDDVVVVVVVVVVVVVVPPPPPPPKKKKKKKKKDDDDDDDDVVVVVVVNNNNNNNNAAAAAAAAAAVVVVVVVAAAAATTTTTTTIIIIIIIIKKKKKKKKKTTTTTTTKKKKKKKKKRRRRRRRRRRRTTTTTTTIIIIIIIIQQQQQQQQQFFFFFFFFFFFVVVVVVVDDDDDDDDWWWWWWWWWWWWWWCCCCCCPPPPPPPTTTTTTTGGGGFFFFFFFFFFFKKKKKKKKKCCCCCCGGGGIIIIIIIINNNNNNNNYYYYYYYYYYYYQQQQQQQQQPPPPPPPPPPPPPPTTTTTTTVVVVVVVVVVVVVVPPPPPPPGGGGGGGGDDDDDDDDLLLLLLLLAAAAARRRRRRRRRRRVVVVVVVQQQQQQQQQRRRRRRRRRRRAAAAAVVVVVVVCCCCCCMMMMMMMMVVVVVVVAAAAANNNNNNNNTTTTTTTTTTTTTTAAAAAIIIIIIIIAAAAAEEEEEEEEEAAAAALLLLLLLLSSSSSSRRRRRRRRRRRIIIIIIIIDDDDDDDDHHHHHHHHHHKKKKKKKKKFFFFFFFFFFFDDDDDDDDLLLLLLLLMMMMMMMMYYYYYYYYYYYYAAAAAKKKKKKKKKRRRRRRRRRRRAAAAAFFFFFFFFFFFVVVVVVVHHHHHHHHHHWWWWWWWWWWWWWWYYYYYYYYYYYYVVVVVVVGGGGEEEEEEEEEGGGGMMMMMMMMEEEEEEEEEEEEEEEEEEGGGGEEEEEEEEEFFFFFFFFFFFSSSSSSEEEEEEEEEAAAAARRRRRRRRRRREEEEEEEEEDDDDDDDDLLLLLLLLAAAAAAAAAALLLLLLLLEEEEEEEEEKKKKKKKKKDDDDDDDDYYYYYYYYYYYYEEEEEEEEEEEEEEEEEEVVVVVVVGGGGAAAAAEEEEEEEEETTTTTTTAAAAAEEEEEEEEEGGGGEEEEEEEEEGGGGEEEEEEEEEEEEEEEEEEEEEEEEEEEDDDDDDDDFFFFFFFFFFFGGGGEEEEEEEEEEEEEEEEEEYYYYYYYYYYYYY

SEQ ID NO: 40 - protein, 3551 aa, Schizosaccharomyces pombe
MMMMMMMMRRRRRRRRRRREEEEEEEEEIIIIIIIIIIIIIIIISSSSSSIIIIIIIIHHHHHHHHHHVVVVVVVGGGGQQQQQQQQQAAAAAGGGGTTTTTTTQQQQQQQQQIIIIIIIIGGGGNNNNNNNNAAAAACCCCCCWWWWWWWWWWWWWWEEEEEEEEELLLLLLLLYYYYYYYYYYYYCCCCCCLLLLLLLLEEEEEEEEEHHHHHHHHHHGGGGIIIIIIIIQQQQQQQQQPPPPPPPNNNNNNNNGGGGYYYYYYYYYYYYMMMMMMMMNNNNNNNNPPPPPPPEEEEEEEEETTTTTTTAAAAASSSSSSQQQQQQQQQNNNNNNNNSSSSSSDDDDDDDDGGGGGGGGFFFFFFFFFFFSSSSSSTTTTTTTFFFFFFFFFFFFFFFFFFFFFFSSSSSSEEEEEEEEETTTTTTTGGGGQQQQQQQQQGGGGKKKKKKKKKYYYYYYYYYYYYVVVVVVVPPPPPPPRRRRRRRRRRRSSSSSSIIIIIIIIYYYYYYYYYYYYVVVVVVVDDDDDDDDLLLLLLLLEEEEEEEEEPPPPPPPNNNNNNNNVVVVVVVIIIIIIIIDDDDDDDDQQQQQQQQQVVVVVVVRRRRRRRRRRRTTTTTTTGGGGPPPPPPPYYYYYYYYYYYYRRRRRRRRRRRDDDDDDDDLLLLLLLLFFFFFFFFFFFHHHHHHHHHHPPPPPPPEEEEEEEEEQQQQQQQQQLLLLLLLLIIIIIIIITTTTTTTGGGGKKKKKKKKKEEEEEEEEEDDDDDDDDAAAAASSSSSSNNNNNNNNNNNNNNNNYYYYYYYYYYYYAAAAARRRRRRRRRRRGGGGHHHHHHHHHHYYYYYYYYYYYYTTTTTTTVVVVVVVGGGGKKKKKKKKKEEEEEEEEELLLLLLLLVVVVVVVDDDDDDDDEEEEEEEEEVVVVVVVTTTTTTTDDDDDDDDKKKKKKKKKIIIIIIIIRRRRRRRRRRRRRRRRRRRRRRIIIIIIIIAAAAADDDDDDDDNNNNNNNNCCCCCCSSSSSSGGGGLLLLLLLLQQQQQQQQQGGGGFFFFFFFFFFFLLLLLLLLVVVVVVVFFFFFFFFFFFHHHHHHHHHHSSSSSSFFFFFFFFFFFGGGGGGGGGGGGTTTTTTTGGGGSSSSSSGGGGFFFFFFFFFFFGGGGAAAAALLLLLLLLLLLLLLLLLLLLLLLLEEEEEEEEERRRRRRRRRRRLLLLLLLLAAAAAMMMMMMMMEEEEEEEEEYYYYYYYYYYYYTTTTTTTKKKKKKKKKKKKKKKKKKSSSSSSKKKKKKKKKLLLLLLLLQQQQQQQQQFFFFFFFFFFFSSSSSSVVVVVVVYYYYYYYYYYYYPPPPPPPAAAAAPPPPPPPQQQQQQQQQVVVVVVVSSSSSSTTTTTTTSSSSSSVVVVVVVVVVVVVVEEEEEEEEEPPPPPPPYYYYYYYYYYYYNNNNNNNNSSSSSSVVVVVVVLLLLLLLLTTTTTTTTTTTTTTHHHHHHHHHHAAAAATTTTTTTLLLLLLLLDDDDDDDDLLLLLLLLAAAAADDDDDDDDCCCCCCTTTTTTTFFFFFFFFFFFMMMMMMMMVVVVVVVDDDDDDDDNNNNNNNNEEEEEEEEESSSSSSCCCCCCYYYYYYYYYYYYDDDDDDDDIIIIIIIICCCCCCRRRRRRRRRRRRRRRRRRRRRRNNNNNNNNLLLLLLLLDDDDDDDDIIIIIIIIEEEEEEEEERRRRRRRRRRRPPPPPPPSSSSSSYYYYYYYYYYYYEEEEEEEEENNNNNNNNLLLLLLLLNNNNNNNNRRRRRRRRRRRLLLLLLLLIIIIIIIIAAAAAQQQQQQQQQVVVVVVVVVVVVVVSSSSSSSSSSSSIIIIIIIITTTTTTTAAAAASSSSSSLLLLLLLLRRRRRRRRRRRFFFFFFFFFFFEEEEEEEEEGGGGSSSSSSLLLLLLLLNNNNNNNNVVVVVVVDDDDDDDDLLLLLLLLAAAAAEEEEEEEEEFFFFFFFFFFFQQQQQQQQQTTTTTTTNNNNNNNNLLLLLLLLVVVVVVVPPPPPPPYYYYYYYYYYYYPPPPPPPRRRRRRRRRRRIIIIIIIIHHHHHHHHHHFFFFFFFFFFFPPPPPPPLLLLLLLLVVVVVVVTTTTTTTYYYYYYYYYYYYAAAAAPPPPPPPIIIIIIIIVVVVVVVSSSSSSAAAAAAAAAAKKKKKKKKKAAAAAFFFFFFFFFFFHHHHHHHHHHEEEEEEEEESSSSSSNNNNNNNNSSSSSSVVVVVVVQQQQQQQQQEEEEEEEEEIIIIIIIITTTTTTTNNNNNNNNQQQQQQQQQCCCCCCFFFFFFFFFFFEEEEEEEEEPPPPPPPYYYYYYYYYYYYNNNNNNNNQQQQQQQQQMMMMMMMMVVVVVVVKKKKKKKKKCCCCCCDDDDDDDDPPPPPPPRRRRRRRRRRRAAAAAGGGGRRRRRRRRRRRYYYYYYYYYYYYMMMMMMMMAAAAATTTTTTTCCCCCCLLLLLLLLLLLLLLLLYYYYYYYYYYYYRRRRRRRRRRRGGGGDDDDDDDDVVVVVVVIIIIIIIIPPPPPPPRRRRRRRRRRRDDDDDDDDVVVVVVVQQQQQQQQQAAAAAAAAAAVVVVVVVTTTTTTTTTTTTTTIIIIIIIIKKKKKKKKKAAAAAKKKKKKKKKRRRRRRRRRRRTTTTTTTIIIIIIIIQQQQQQQQQFFFFFFFFFFFVVVVVVVDDDDDDDDWWWWWWWWWWWWWWCCCCCCPPPPPPPTTTTTTTGGGGFFFFFFFFFFFKKKKKKKKKIIIIIIIIGGGGIIIIIIIICCCCCCDDDDDDDDRRRRRRRRRRRPPPPPPPPPPPPPPQQQQQQQQQHHHHHHHHHHIIIIIIIIEEEEEEEEEGGGGSSSSSSEEEEEEEEEIIIIIIIIAAAAAKKKKKKKKKVVVVVVVDDDDDDDDRRRRRRRRRRRAAAAAVVVVVVVCCCCCCMMMMMMMMLLLLLLLLSSSSSSNNNNNNNNTTTTTTTTTTTTTTSSSSSSIIIIIIIIAAAAAEEEEEEEEEAAAAAWWWWWWWWWWWWWWSSSSSSRRRRRRRRRRRLLLLLLLLDDDDDDDDHHHHHHHHHHKKKKKKKKKFFFFFFFFFFFDDDDDDDDLLLLLLLLMMMMMMMMYYYYYYYYYYYYSSSSSSKKKKKKKKKRRRRRRRRRRRAAAAAFFFFFFFFFFFVVVVVVVHHHHHHHHHHWWWWWWWWWWWWWWYYYYYYYYYYYYVVVVVVVGGGGEEEEEEEEEGGGGMMMMMMMMEEEEEEEEEEEEEEEEEEGGGGEEEEEEEEEFFFFFFFFFFFSSSSSSEEEEEEEEEAAAAARRRRRRRRRRREEEEEEEEEDDDDDDDDLLLLLLLLAAAAAAAAAALLLLLLLLEEEEEEEEERRRRRRRRRRRDDDDDDDDYYYYYYYYYYYYEEEEEEEEEEEEEEEEEEVVVVVVVGGGGQQQQQQQQQDDDDDDDDSSSSSSMMMMMMMMEEEEEEEEEVVVVVVVDDDDDDDDYYYYYYYYYYYYMMMMMMMMEEEEEEEEEEEEEEEEEEEEEEEEEEEYYYYYYYYYYYYY

SEQ ID NO: 41 - protein, 3462 aa, Stylonychia lemnae
MMMMMMMMRRRRRRRRRRREEEEEEEEEVVVVVVVIIIIIIIISSSSSSIIIIIIIIHHHHHHHHHHVVVVVVVGGGGQQQQQQQQQAAAAAGGGGIIIIIIIIQQQQQQQQQVVVVVVVGGGGNNNNNNNNAAAAACCCCCCWWWWWWWWWWWWWWEEEEEEEEELLLLLLLLFFFFFFFFFFFCCCCCCLLLLLLLLEEEEEEEEEHHHHHHHHHHGGGGIIIIIIIIQQQQQQQQQPPPPPPPDDDDDDDDGGGGQQQQQQQQQMMMMMMMMPPPPPPPSSSSSSNNNNNNNNKKKKKKKKKTTTTTTTIIIIIIIIGGGGGGGGGGGGDDDDDDDDDDDDDDDDAAAAAFFFFFFFFFFFNNNNNNNNTTTTTTTFFFFFFFFFFFFFFFFFFFFFFSSSSSSEEEEEEEEETTTTTTTGGGGTTTTTTTGGGGKKKKKKKKKHHHHHHHHHHVVVVVVVPPPPPPPRRRRRRRRRRRCCCCCCVVVVVVVFFFFFFFFFFFLLLLLLLLDDDDDDDDLLLLLLLLGGGGPPPPPPPTTTTTTTVVVVVVVIIIIIIIIDDDDDDDDEEEEEEEEEVVVVVVVRRRRRRRRRRRTTTTTTTGGGGTTTTTTTYYYYYYYYYYYYRRRRRRRRRRRQQQQQQQQQLLLLLLLLFFFFFFFFFFFHHHHHHHHHHPPPPPPPEEEEEEEEEQQQQQQQQQLLLLLLLLIIIIIIIISSSSSSGGGGKKKKKKKKKEEEEEEEEEDDDDDDDDAAAAAAAAAANNNNNNNNNNNNNNNNFFFFFFFFFFFAAAAARRRRRRRRRRRGGGGHHHHHHHHHHYYYYYYYYYYYYTTTTTTTIIIIIIIIGGGGKKKKKKKKKEEEEEEEEEIIIIIIIIVVVVVVVDDDDDDDDLLLLLLLLCCCCCCLLLLLLLLDDDDDDDDGGGGIIIIIIIIRRRRRRRRRRRKKKKKKKKKLLLLLLLLAAAAADDDDDDDDQQQQQQQQQCCCCCCTTTTTTTGGGGLLLLLLLLQQQQQQQQQGGGGFFFFFFFFFFFLLLLLLLLVVVVVVVFFFFFFFFFFFNNNNNNNNSSSSSSVVVVVVVGGGGGGGGGGGGTTTTTTTGGGGSSSSSSGGGGLLLLLLLLGGGGSSSSSSLLLLLLLLLLLLLLLLLLLLLLLLEEEEEEEEERRRRRRRRRRRLLLLLLLLSSSSSSVVVVVVVDDDDDDDDYYYYYYYYYYYYGGGGKKKKKKKKKKKKKKKKKKSSSSSSKKKKKKKKKLLLLLLLLGGGGFFFFFFFFFFFTTTTTTTIIIIIIIIYYYYYYYYYYYYPPPPPPPSSSSSSPPPPPPPQQQQQQQQQVVVVVVVSSSSSSTTTTTTTAAAAAVVVVVVVVVVVVVVEEEEEEEEEPPPPPPPYYYYYYYYYYYYNNNNNNNNSSSSSSVVVVVVVLLLLLLLLSSSSSSTTTTTTTHHHHHHHHHHSSSSSSLLLLLLLLLLLLLLLLEEEEEEEEEHHHHHHHHHHTTTTTTTDDDDDDDDVVVVVVVAAAAAVVVVVVVMMMMMMMMLLLLLLLLDDDDDDDDNNNNNNNNEEEEEEEEEAAAAAVVVVVVVYYYYYYYYYYYYDDDDDDDDIIIIIIIICCCCCCRRRRRRRRRRRRRRRRRRRRRRNNNNNNNNLLLLLLLLDDDDDDDDIIIIIIIIEEEEEEEEERRRRRRRRRRRPPPPPPPTTTTTTTYYYYYYYYYYYYTTTTTTTNNNNNNNNLLLLLLLLNNNNNNNNRRRRRRRRRRRLLLLLLLLIIIIIIIIAAAAAQQQQQQQQQVVVVVVVIIIIIIIISSSSSSSSSSSSLLLLLLLLTTTTTTTAAAAASSSSSSLLLLLLLLRRRRRRRRRRRFFFFFFFFFFFDDDDDDDDGGGGAAAAALLLLLLLLNNNNNNNNVVVVVVVDDDDDDDDVVVVVVVTTTTTTTEEEEEEEEEFFFFFFFFFFFQQQQQQQQQTTTTTTTNNNNNNNNLLLLLLLLVVVVVVVPPPPPPPYYYYYYYYYYYYPPPPPPPRRRRRRRRRRRIIIIIIIIHHHHHHHHHHFFFFFFFFFFFMMMMMMMMLLLLLLLLSSSSSSSSSSSSAAAAAPPPPPPPVVVVVVVIIIIIIIISSSSSSAAAAAEEEEEEEEEKKKKKKKKKAAAAAYYYYYYYYYYYYHHHHHHHHHHEEEEEEEEEQQQQQQQQQLLLLLLLLSSSSSSVVVVVVVAAAAAEEEEEEEEEIIIIIIIITTTTTTTNNNNNNNNSSSSSSAAAAAFFFFFFFFFFFEEEEEEEEEPPPPPPPAAAAASSSSSSMMMMMMMMMMMMMMMMAAAAAKKKKKKKKKCCCCCCDDDDDDDDPPPPPPPRRRRRRRRRRRHHHHHHHHHHGGGGKKKKKKKKKYYYYYYYYYYYYMMMMMMMMAAAAACCCCCCCCCCCCLLLLLLLLMMMMMMMMYYYYYYYYYYYYRRRRRRRRRRRGGGGDDDDDDDDVVVVVVVVVVVVVVPPPPPPPKKKKKKKKKDDDDDDDDVVVVVVVNNNNNNNNAAAAAAAAAAVVVVVVVAAAAATTTTTTTIIIIIIIIKKKKKKKKKTTTTTTTKKKKKKKKKRRRRRRRRRRRTTTTTTTIIIIIIIIQQQQQQQQQFFFFFFFFFFFVVVVVVVDDDDDDDDWWWWWWWWWWWWWWCCCCCCPPPPPPPTTTTTTTGGGGFFFFFFFFFFFKKKKKKKKKCCCCCCGGGGIIIIIIIINNNNNNNNYYYYYYYYYYYYQQQQQQQQQPPPPPPPPPPPPPPTTTTTTTVVVVVVVVVVVVVVPPPPPPPSSSSSSGGGGDDDDDDDDLLLLLLLLAAAAAKKKKKKKKKVVVVVVVMMMMMMMMRRRRRRRRRRRAAAAAVVVVVVVCCCCCCMMMMMMMMIIIIIIIISSSSSSNNNNNNNNSSSSSSTTTTTTTAAAAAIIIIIIIIAAAAAEEEEEEEEEVVVVVVVFFFFFFFFFFFSSSSSSRRRRRRRRRRRIIIIIIIIDDDDDDDDHHHHHHHHHHKKKKKKKKKFFFFFFFFFFFDDDDDDDDLLLLLLLLMMMMMMMMYYYYYYYYYYYYAAAAAKKKKKKKKKRRRRRRRRRRRAAAAAFFFFFFFFFFFVVVVVVVHHHHHHHHHHWWWWWWWWWWWWWWYYYYYYYYYYYYVVVVVVVGGGGEEEEEEEEEGGGGMMMMMMMMEEEEEEEEEEEEEEEEEEGGGGEEEEEEEEEFFFFFFFFFFFSSSSSSEEEEEEEEEAAAAARRRRRRRRRRREEEEEEEEEDDDDDDDDLLLLLLLLAAAAAAAAAALLLLLLLLEEEEEEEEEKKKKKKKKKDDDDDDDDYYYYYYYYYYYYEEEEEEEEEEEEEEEEEEVVVVVVVGGGGIIIIIIIIEEEEEEEEETTTTTTTAAAAAEEEEEEEEEGGGGEEEEEEEEEGGGGEEEEEEEEEEEEEEEEEEEEEEEEEEEGGGGMMMMMMMMEEEEEEEEEE

SEQ ID NO: 42 - protein, 3488 aa, Arabidopsis thaliana
MMMMMMMMRRRRRRRRRRREEEEEEEEEIIIIIIIIIIIIIIIISSSSSSIIIIIIIIHHHHHHHHHHIIIIIIIIGGGGQQQQQQQQQAAAAAGGGGIIIIIIIIQQQQQQQQQVVVVVVVGGGGNNNNNNNNSSSSSSCCCCCCWWWWWWWWWWWWWWEEEEEEEEELLLLLLLLYYYYYYYYYYYYCCCCCCLLLLLLLLEEEEEEEEEHHHHHHHHHHGGGGIIIIIIIIQQQQQQQQQPPPPPPPDDDDDDDDGGGGMMMMMMMMMMMMMMMMPPPPPPPSSSSSSDDDDDDDDTTTTTTTTTTTTTTVVVVVVVGGGGVVVVVVVAAAAAHHHHHHHHHHDDDDDDDDAAAAAFFFFFFFFFFFNNNNNNNNTTTTTTTFFFFFFFFFFFFFFFFFFFFFFSSSSSSEEEEEEEEETTTTTTTGGGGAAAAAGGGGKKKKKKKKKHHHHHHHHHHVVVVVVVPPPPPPPRRRRRRRRRRRAAAAAVVVVVVVFFFFFFFFFFFVVVVVVVDDDDDDDDLLLLLLLLEEEEEEEEEPPPPPPPTTTTTTTVVVVVVVIIIIIIIIDDDDDDDDEEEEEEEEEVVVVVVVRRRRRRRRRRRTTTTTTTGGGGTTTTTTTYYYYYYYYYYYYRRRRRRRRRRRQQQQQQQQQLLLLLLLLFFFFFFFFFFFHHHHHHHHHHPPPPPPPEEEEEEEEEQQQQQQQQQLLLLLLLLIIIIIIIISSSSSSGGGGKKKKKKKKKEEEEEEEEEDDDDDDDDAAAAAAAAAANNNNNNNNNNNNNNNNFFFFFFFFFFFAAAAARRRRRRRRRRRGGGGHHHHHHHHHHYYYYYYYYYYYYTTTTTTTVVVVVVVGGGGKKKKKKKKKEEEEEEEEEIIIIIIIIVVVVVVVDDDDDDDDLLLLLLLLCCCCCCLLLLLLLLDDDDDDDDRRRRRRRRRRRVVVVVVVRRRRRRRRRRRKKKKKKKKKLLLLLLLLAAAAADDDDDDDDNNNNNNNNCCCCCCTTTTTTTGGGGLLLLLLLLQQQQQQQQQGGGGFFFFFFFFFFFLLLLLLLLVVVVVVVFFFFFFFFFFFNNNNNNNNAAAAAVVVVVVVGGGGGGGGGGGGTTTTTTTGGGGSSSSSSGGGGLLLLLLLLGGGGSSSSSSLLLLLLLLLLLLLLLLLLLLLLLLEEEEEEEEERRRRRRRRRRRLLLLLLLLSSSSSSVVVVVVVDDDDDDDDYYYYYYYYYYYYGGGGKKKKKKKKKKKKKKKKKKSSSSSSKKKKKKKKKLLLLLLLLGGGGFFFFFFFFFFFTTTTTTTIIIIIIIIYYYYYYYYYYYYPPPPPPPSSSSSSPPPPPPPQQQQQQQQQVVVVVVVSSSSSSTTTTTTTAAAAAVVVVVVVVVVVVVVEEEEEEEEEPPPPPPPYYYYYYYYYYYYNNNNNNNNSSSSSSVVVVVVVLLLLLLLLSSSSSSTTTTTTTHHHHHHHHHHSSSSSSLLLLLLLLLLLLLLLLEEEEEEEEEHHHHHHHHHHTTTTTTTDDDDDDDDVVVVVVVAAAAAVVVVVVVLLLLLLLLLLLLLLLLDDDDDDDDNNNNNNNNEEEEEEEEEAAAAAIIIIIIIIYYYYYYYYYYYYDDDDDDDDIIIIIIIICCCCCCRRRRRRRRRRRRRRRRRRRRRRSSSSSSLLLLLLLLDDDDDDDDIIIIIIIIEEEEEEEEERRRRRRRRRRRPPPPPPPTTTTTTTYYYYYYYYYYYYTTTTTTTNNNNNNNNLLLLLLLLNNNNNNNNRRRRRRRRRRRLLLLLLLLIIIIIIIISSSSSSQQQQQQQQQIIIIIIIIIIIIIIIISSSSSSSSSSSSLLLLLLLLTTTTTTTTTTTTTTSSSSSSLLLLLLLLRRRRRRRRRRRFFFFFFFFFFFDDDDDDDDGGGGAAAAAIIIIIIIINNNNNNNNVVVVVVVDDDDDDDDIIIIIIIITTTTTTTEEEEEEEEEFFFFFFFFFFFQQQQQQQQQTTTTTTTNNNNNNNNLLLLLLLLVVVVVVVPPPPPPPYYYYYYYYYYYYPPPPPPPRRRRRRRRRRRIIIIIIIIHHHHHHHHHHFFFFFFFFFFFMMMMMMMMLLLLLLLLSSSSSSSSSSSSYYYYYYYYYYYYAAAAAPPPPPPPVVVVVVVIIIIIIIISSSSSSAAAAAAAAAAKKKKKKKKKAAAAAYYYYYYYYYYYYHHHHHHHHHHEEEEEEEEEQQQQQQQQQLLLLLLLLSSSSSSVVVVVVVPPPPPPPEEEEEEEEEIIIIIIIITTTTTTTNNNNNNNNAAAAAVVVVVVVFFFFFFFFFFFEEEEEEEEEPPPPPPPAAAAASSSSSSMMMMMMMMMMMMMMMMAAAAAKKKKKKKKKCCCCCCDDDDDDDDPPPPPPPRRRRRRRRRRRHHHHHHHHHHGGGGKKKKKKKKKYYYYYYYYYYYYMMMMMMMMAAAAACCCCCCCCCCCCLLLLLLLLMMMMMMMMYYYYYYYYYYYYRRRRRRRRRRRGGGGDDDDDDDDVVVVVVVVVVVVVVPPPPPPPKKKKKKKKKDDDDDDDDVVVVVVVNNNNNNNNAAAAAAAAAAVVVVVVVGGGGTTTTTTTIIIIIIIIKKKKKKKKKTTTTTTTKKKKKKKKKRRRRRRRRRRRTTTTTTTVVVVVVVQQQQQQQQQFFFFFFFFFFFVVVVVVVDDDDDDDDWWWWWWWWWWWWWWCCCCCCPPPPPPPTTTTTTTGGGGFFFFFFFFFFFKKKKKKKKKCCCCCCGGGGIIIIIIIINNNNNNNNYYYYYYYYYYYYQQQQQQQQQPPPPPPPPPPPPPPTTTTTTTVVVVVVVVVVVVVVPPPPPPPGGGGGGGGDDDDDDDDLLLLLLLLAAAAAKKKKKKKKKVVVVVVVQQQQQQQQQRRRRRRRRRRRAAAAAVVVVVVVCCCCCCMMMMMMMMIIIIIIIISSSSSSNNNNNNNNNNNNNNNNTTTTTTTAAAAAVVVVVVVAAAAAEEEEEEEEEVVVVVVVFFFFFFFFFFFSSSSSSRRRRRRRRRRRIIIIIIIIDDDDDDDDHHHHHHHHHHKKKKKKKKKFFFFFFFFFFFDDDDDDDDLLLLLLLLMMMMMMMMYYYYYYYYYYYYAAAAAKKKKKKKKKRRRRRRRRRRRAAAAAFFFFFFFFFFFVVVVVVVHHHHHHHHHHWWWWWWWWWWWWWWYYYYYYYYYYYYVVVVVVVGGGGEEEEEEEEEGGGGMMMMMMMMEEEEEEEEEEEEEEEEEEGGGGEEEEEEEEEFFFFFFFFFFFSSSSSSEEEEEEEEEAAAAARRRRRRRRRRREEEEEEEEEDDDDDDDDLLLLLLLLAAAAAAAAAALLLLLLLLEEEEEEEEEKKKKKKKKKDDDDDDDDYYYYYYYYYYYYEEEEEEEEEEEEEEEEEEVVVVVVVGGGGAAAAAEEEEEEEEEGGGGGGGGDDDDDDDDDDDDDDDDEEEEEEEEEEEEEEEEEEDDDDDDDDEEEEEEEEEGGGGEEEEEEEEEDDDDDDDDYYYYYYYYYYYYY

SEQ ID NO: 43 - protein, 2537 aa, Gallus gallus
AAAAADDDDDDDDQQQQQQQQQCCCCCCSSSSSSGGGGLLLLLLLLQQQQQQQQQGGGGFFFFFFFFFFFLLLLLLLLVVVVVVVFFFFFFFFFFFHHHHHHHHHHSSSSSSFFFFFFFFFFFGGGGGGGGGGGGTTTTTTTGGGGSSSSSSGGGGFFFFFFFFFFFTTTTTTTSSSSSSLLLLLLLLLLLLLLLLMMMMMMMMEEEEEEEEERRRRRRRRRRRLLLLLLLLSSSSSSVVVVVVVEEEEEEEEEYYYYYYYYYYYYSSSSSSKKKKKKKKKKKKKKKKKKSSSSSSKKKKKKKKKLLLLLLLLEEEEEEEEEFFFFFFFFFFFSSSSSSVVVVVVVYYYYYYYYYYYYPPPPPPPDDDDDDDDRRRRRRRRRRRQQQQQQQQQVVVVVVVSSSSSSTTTTTTTAAAAAVVVVVVVVVVVVVVEEEEEEEEEPPPPPPPYYYYYYYYYYYYNNNNNNNNSSSSSSIIIIIIIILLLLLLLLTTTTTTTTTTTTTTHHHHHHHHHHTTTTTTTTTTTTTTLLLLLLLLEEEEEEEEEHHHHHHHHHHSSSSSSDDDDDDDDCCCCCCSSSSSSFFFFFFFFFFFMMMMMMMMVVVVVVVDDDDDDDDNNNNNNNNEEEEEEEEEAAAAAIIIIIIIIYYYYYYYYYYYYDDDDDDDDIIIIIIIICCCCCCNNNNNNNNRRRRRRRRRRRNNNNNNNNLLLLLLLLDDDDDDDDIIIIIIIIEEEEEEEEERRRRRRRRRRRPPPPPPPTTTTTTTYYYYYYYYYYYYTTTTTTTNNNNNNNNLLLLLLLLNNNNNNNNRRRRRRRRRRRLLLLLLLLIIIIIIIIGGGGQQQQQQQQQIIIIIIIIVVVVVVVSSSSSSSSSSSSVVVVVVVTTTTTTTAAAAASSSSSSLLLLLLLLRRRRRRRRRRRFFFFFFFFFFFNNNNNNNNGGGGAAAAALLLLLLLLNNNNNNNNVVVVVVVDDDDDDDDLLLLLLLLIIIIIIIIEEEEEEEEEFFFFFFFFFFFQQQQQQQQQTTTTTTTNNNNNNNNLLLLLLLLVVVVVVVPPPPPPPYYYYYYYYYYYYPPPPPPPRRRRRRRRRRRIIIIIIIIHHHHHHHHHHFFFFFFFFFFFPPPPPPPLLLLLLLLTTTTTTTTTTTTTTYYYYYYYYYYYYAAAAARRRRRRRRRRRIIIIIIIIIIIIIIIISSSSSSAAAAAEEEEEEEEEKKKKKKKKKAAAAAYYYYYYYYYYYYHHHHHHHHHHEEEEEEEEEQQQQQQQQQLLLLLLLLSSSSSSVVVVVVVPPPPPPPEEEEEEEEEIIIIIIIITTTTTTTNNNNNNNNAAAAACCCCCCFFFFFFFFFFFEEEEEEEEEFFFFFFFFFFFSSSSSSNNNNNNNNQQQQQQQQQMMMMMMMMVVVVVVVKKKKKKKKKCCCCCCDDDDDDDDPPPPPPPRRRRRRRRRRRRRRRRRRRRRRGGGGKKKKKKKKKYYYYYYYYYYYYMMMMMMMMAAAAACCCCCCCCCCCCLLLLLLLLLLLLLLLLYYYYYYYYYYYYRRRRRRRRRRRGGGGDDDDDDDDVVVVVVVVVVVVVVPPPPPPPKKKKKKKKKDDDDDDDDVVVVVVVNNNNNNNNAAAAAAAAAAIIIIIIIIAAAAAAAAAAIIIIIIIIKKKKKKKKKTTTTTTTRRRRRRRRRRRRRRRRRRRRRRSSSSSSIIIIIIIIQQQQQQQQQFFFFFFFFFFFVVVVVVVDDDDDDDDWWWWWWWWWWWWWWCCCCCCPPPPPPPTTTTTTTGGGGFFFFFFFFFFFKKKKKKKKKVVVVVVVGGGGIIIIIIIINNNNNNNNYYYYYYYYYYYYQQQQQQQQQPPPPPPPPPPPPPPTTTTTTTVVVVVVVVVVVVVVPPPPPPPGGGGGGGGDDDDDDDDLLLLLLLLAAAAAKKKKKKKKKVVVVVVVQQQQQQQQQRRRRRRRRRRRAAAAAVVVVVVVCCCCCCMMMMMMMMLLLLLLLLSSSSSSNNNNNNNNTTTTTTTTTTTTTTAAAAAIIIIIIIIAAAAAEEEEEEEEEAAAAAWWWWWWWWWWWWWWAAAAARRRRRRRRRRRLLLLLLLLDDDDDDDDHHHHHHHHHHKKKKKKKKKFFFFFFFFFFFDDDDDDDDLLLLLLLLMMMMMMMMYYYYYYYYYYYYAAAAAKKKKKKKKKRRRRRRRRRRRAAAAAFFFFFFFFFFFVVVVVVVHHHHHHHHHHWWWWWWWWWWWWWWYYYYYYYYYYYYVVVVVVVGGGGEEEEEEEEEGGGGMMMMMMMMEEEEEEEEEEEEEEEEEEGGGGEEEEEEEEEFFFFFFFFFFFSSSSSSEEEEEEEEEAAAAARRRRRRRRRRREEEEEEEEEDDDDDDDDLLLLLLLLAAAAAAAAAALLLLLLLLEEEEEEEEEKKKKKKKKKDDDDDDDDYYYYYYYYYYYYEEEEEEEEEEEEEEEEEEVVVVVVVGGGGRRRRRRRRRRRNNNNNNNNSSSSSSAAAAADDDDDDDDGGGGGGGGEEEEEEEEEFFFFFFFFFFFEEEEEEEEEEEEEEEEEEE

SEQ ID NO: 44 - protein, 3507 aa, Drosophila melanogaster
MMMMMMMMRRRRRRRRRRREEEEEEEEECCCCCCIIIIIIIISSSSSSIIIIIIIIHHHHHHHHHHVVVVVVVGGGGQQQQQQQQQAAAAAGGGGVVVVVVVQQQQQQQQQIIIIIIIIGGGGNNNNNNNNAAAAACCCCCCWWWWWWWWWWWWWWEEEEEEEEELLLLLLLLYYYYYYYYYYYYCCCCCCLLLLLLLLEEEEEEEEEHHHHHHHHHHGGGGIIIIIIIIQQQQQQQQQPPPPPPPDDDDDDDDGGGGQQQQQQQQQMMMMMMMMPPPPPPPSSSSSSDDDDDDDDKKKKKKKKKTTTTTTTVVVVVVVGGGGGGGGGGGGDDDDDDDDDDDDDDDDSSSSSSFFFFFFFFFFFNNNNNNNNTTTTTTTFFFFFFFFFFFFFFFFFFFFFFSSSSSSEEEEEEEEETTTTTTTGGGGAAAAAGGGGKKKKKKKKKHHHHHHHHHHVVVVVVVPPPPPPPRRRRRRRRRRRAAAAAVVVVVVVFFFFFFFFFFFVVVVVVVDDDDDDDDLLLLLLLLEEEEEEEEEPPPPPPPTTTTTTTVVVVVVVVVVVVVVDDDDDDDDEEEEEEEEEVVVVVVVRRRRRRRRRRRTTTTTTTGGGGTTTTTTTYYYYYYYYYYYYRRRRRRRRRRRQQQQQQQQQLLLLLLLLFFFFFFFFFFFHHHHHHHHHHPPPPPPPEEEEEEEEEQQQQQQQQQLLLLLLLLIIIIIIIITTTTTTTGGGGKKKKKKKKKEEEEEEEEEDDDDDDDDAAAAAAAAAANNNNNNNNNNNNNNNNYYYYYYYYYYYYAAAAARRRRRRRRRRRGGGGHHHHHHHHHHYYYYYYYYYYYYTTTTTTTIIIIIIIIGGGGKKKKKKKKKEEEEEEEEEIIIIIIIIVVVVVVVDDDDDDDDLLLLLLLLVVVVVVVLLLLLLLLDDDDDDDDRRRRRRRRRRRIIIIIIIIRRRRRRRRRRRKKKKKKKKKLLLLLLLLAAAAADDDDDDDDQQQQQQQQQCCCCCCTTTTTTTGGGGLLLLLLLLQQQQQQQQQGGGGFFFFFFFFFFFLLLLLLLLIIIIIIIIFFFFFFFFFFFHHHHHHHHHHSSSSSSFFFFFFFFFFFGGGGGGGGGGGGTTTTTTTGGGGSSSSSSGGGGFFFFFFFFFFFTTTTTTTSSSSSSLLLLLLLLLLLLLLLLMMMMMMMMEEEEEEEEERRRRRRRRRRRLLLLLLLLSSSSSSVVVVVVVDDDDDDDDYYYYYYYYYYYYGGGGKKKKKKKKKKKKKKKKKKSSSSSSKKKKKKKKKLLLLLLLLEEEEEEEEEFFFFFFFFFFFAAAAAVVVVVVVYYYYYYYYYYYYPPPPPPPAAAAAPPPPPPPQQQQQQQQQVVVVVVVSSSSSSTTTTTTTAAAAAVVVVVVVVVVVVVVEEEEEEEEEPPPPPPPYYYYYYYYYYYYNNNNNNNNSSSSSSIIIIIIIILLLLLLLLTTTTTTTTTTTTTTHHHHHHHHHHTTTTTTTTTTTTTTLLLLLLLLEEEEEEEEEHHHHHHHHHHSSSSSSDDDDDDDDCCCCCCAAAAAFFFFFFFFFFFMMMMMMMMVVVVVVVDDDDDDDDNNNNNNNNEEEEEEEEEAAAAAIIIIIIIIYYYYYYYYYYYYDDDDDDDDIIIIIIIICCCCCCRRRRRRRRRRRRRRRRRRRRRRNNNNNNNNLLLLLLLLDDDDDDDDIIIIIIIIEEEEEEEEERRRRRRRRRRRPPPPPPPTTTTTTTYYYYYYYYYYYYTTTTTTTNNNNNNNNLLLLLLLLNNNNNNNNRRRRRRRRRRRLLLLLLLLIIIIIIIIGGGGQQQQQQQQQIIIIIIIIVVVVVVVSSSSSSSSSSSSIIIIIIIITTTTTTTAAAAASSSSSSLLLLLLLLRRRRRRRRRRRFFFFFFFFFFFDDDDDDDDGGGGAAAAALLLLLLLLNNNNNNNNVVVVVVVDDDDDDDDLLLLLLLLTTTTTTTEEEEEEEEEFFFFFFFFFFFQQQQQQQQQTTTTTTTNNNNNNNNLLLLLLLLVVVVVVVPPPPPPPYYYYYYYYYYYYPPPPPPPRRRRRRRRRRRIIIIIIIIHHHHHHHHHHFFFFFFFFFFFPPPPPPPLLLLLLLLVVVVVVVTTTTTTTYYYYYYYYYYYYAAAAAPPPPPPPVVVVVVVIIIIIIIISSSSSSAAAAAEEEEEEEEEKKKKKKKKKAAAAAYYYYYYYYYYYYHHHHHHHHHHEEEEEEEEEQQQQQQQQQLLLLLLLLSSSSSSVVVVVVVAAAAAEEEEEEEEEIIIIIIIITTTTTTTNNNNNNNNAAAAACCCCCCFFFFFFFFFFFEEEEEEEEEPPPPPPPAAAAANNNNNNNNQQQQQQQQQMMMMMMMMVVVVVVVKKKKKKKKKVVVVVVVDDDDDDDDPPPPPPPRRRRRRRRRRRHHHHHHHHHHGGGGKKKKKKKKKYYYYYYYYYYYYMMMMMMMMAAAAACCCCCCCCCCCCMMMMMMMMLLLLLLLLYYYYYYYYYYYYRRRRRRRRRRRGGGGDDDDDDDDVVVVVVVVVVVVVVPPPPPPPKKKKKKKKKDDDDDDDDVVVVVVVNNNNNNNNAAAAAAAAAAIIIIIIIIAAAAATTTTTTTIIIIIIIIKKKKKKKKKTTTTTTTKKKKKKKKKRRRRRRRRRRRTTTTTTTIIIIIIIIQQQQQQQQQFFFFFFFFFFFVVVVVVVDDDDDDDDWWWWWWWWWWWWWWCCCCCCPPPPPPPTTTTTTTGGGGFFFFFFFFFFFKKKKKKKKKVVVVVVVGGGGIIIIIIIINNNNNNNNYYYYYYYYYYYYQQQQQQQQQPPPPPPPPPPPPPPTTTTTTTVVVVVVVVVVVVVVPPPPPPPGGGGGGGGDDDDDDDDLLLLLLLLAAAAAKKKKKKKKKVVVVVVVQQQQQQQQQRRRRRRRRRRRAAAAAVVVVVVVCCCCCCMMMMMMMMLLLLLLLLSSSSSSNNNNNNNNTTTTTTTTTTTTTTAAAAAIIIIIIIIAAAAAEEEEEEEEEAAAAAWWWWWWWWWWWWWWAAAAARRRRRRRRRRRLLLLLLLLDDDDDDDDHHHHHHHHHHKKKKKKKKKFFFFFFFFFFFDDDDDDDDLLLLLLLLMMMMMMMMYYYYYYYYYYYYAAAAAKKKKKKKKKRRRRRRRRRRRAAAAAFFFFFFFFFFFVVVVVVVHHHHHHHHHHWWWWWWWWWWWWWWYYYYYYYYYYYYVVVVVVVGGGGEEEEEEEEEGGGGMMMMMMMMEEEEEEEEEEEEEEEEEEGGGGEEEEEEEEEFFFFFFFFFFFSSSSSSEEEEEEEEEAAAAARRRRRRRRRRREEEEEEEEEDDDDDDDDLLLLLLLLAAAAAAAAAALLLLLLLLEEEEEEEEEKKKKKKKKKDDDDDDDDYYYYYYYYYYYYEEEEEEEEEEEEEEEEEEVVVVVVVGGGGMMMMMMMMDDDDDDDDSSSSSSGGGGDDDDDDDDGGGGEEEEEEEEEGGGGEEEEEEEEEGGGGAAAAAEEEEEEEEEEEEEEEEEEYYYYYYYYYYYYY

SEQ ID NO: 45 - protein, 3486 aa, Eleusine indica
MMMMMMMMRRRRRRRRRRREEEEEEEEEIIIIIIIIIIIIIIIISSSSSSIIIIIIIIHHHHHHHHHHIIIIIIIIGGGGQQQQQQQQQAAAAAGGGGIIIIIIIIQQQQQQQQQVVVVVVVGGGGNNNNNNNNAAAAACCCCCCWWWWWWWWWWWWWWEEEEEEEEELLLLLLLLYYYYYYYYYYYYCCCCCCLLLLLLLLEEEEEEEEEHHHHHHHHHHGGGGIIIIIIIIEEEEEEEEEPPPPPPPDDDDDDDDGGGGTTTTTTTMMMMMMMMPPPPPPPSSSSSSDDDDDDDDTTTTTTTSSSSSSVVVVVVVGGGGVVVVVVVAAAAAHHHHHHHHHHDDDDDDDDAAAAAFFFFFFFFFFFNNNNNNNNTTTTTTTFFFFFFFFFFFFFFFFFFFFFFSSSSSSEEEEEEEEETTTTTTTGGGGSSSSSSGGGGKKKKKKKKKHHHHHHHHHHVVVVVVVPPPPPPPRRRRRRRRRRRAAAAAIIIIIIIIFFFFFFFFFFFVVVVVVVDDDDDDDDLLLLLLLLEEEEEEEEEPPPPPPPTTTTTTTVVVVVVVIIIIIIIIDDDDDDDDEEEEEEEEEVVVVVVVRRRRRRRRRRRTTTTTTTGGGGSSSSSSYYYYYYYYYYYYRRRRRRRRRRRQQQQQQQQQLLLLLLLLFFFFFFFFFFFHHHHHHHHHHPPPPPPPEEEEEEEEEQQQQQQQQQLLLLLLLLIIIIIIIISSSSSSGGGGKKKKKKKKKEEEEEEEEEDDDDDDDDAAAAAAAAAANNNNNNNNNNNNNNNNFFFFFFFFFFFAAAAARRRRRRRRRRRGGGGHHHHHHHHHHYYYYYYYYYYYYTTTTTTTVVVVVVVGGGGKKKKKKKKKEEEEEEEEEIIIIIIIIVVVVVVVDDDDDDDDLLLLLLLLCCCCCCLLLLLLLLDDDDDDDDRRRRRRRRRRRVVVVVVVRRRRRRRRRRRKKKKKKKKKLLLLLLLLAAAAADDDDDDDDNNNNNNNNCCCCCCTTTTTTTGGGGLLLLLLLLQQQQQQQQQGGGGFFFFFFFFFFFLLLLLLLLVVVVVVVFFFFFFFFFFFNNNNNNNNAAAAAVVVVVVVGGGGGGGGGGGGTTTTTTTGGGGSSSSSSGGGGLLLLLLLLGGGGSSSSSSLLLLLLLLLLLLLLLLLLLLLLLLEEEEEEEEERRRRRRRRRRRLLLLLLLLSSSSSSVVVVVVVDDDDDDDDYYYYYYYYYYYYGGGGKKKKKKKKKKKKKKKKKKSSSSSSKKKKKKKKKLLLLLLLLGGGGFFFFFFFFFFFTTTTTTTIIIIIIIIYYYYYYYYYYYYPPPPPPPSSSSSSPPPPPPPQQQQQQQQQVVVVVVVSSSSSSTTTTTTTAAAAAVVVVVVVVVVVVVVEEEEEEEEEPPPPPPPYYYYYYYYYYYYNNNNNNNNSSSSSSVVVVVVVLLLLLLLLSSSSSSTTTTTTTHHHHHHHHHHSSSSSSLLLLLLLLLLLLLLLLEEEEEEEEEHHHHHHHHHHTTTTTTTDDDDDDDDVVVVVVVAAAAAVVVVVVVLLLLLLLLLLLLLLLLDDDDDDDDNNNNNNNNEEEEEEEEEAAAAAIIIIIIIIYYYYYYYYYYYYDDDDDDDDIIIIIIIICCCCCCRRRRRRRRRRRRRRRRRRRRRRSSSSSSLLLLLLLLDDDDDDDDIIIIIIIIEEEEEEEEERRRRRRRRRRRPPPPPPPTTTTTTTYYYYYYYYYYYYTTTTTTTNNNNNNNNLLLLLLLLNNNNNNNNRRRRRRRRRRRLLLLLLLLIIIIIIIISSSSSSQQQQQQQQQIIIIIIIIIIIIIIIISSSSSSSSSSSSLLLLLLLLTTTTTTTTTTTTTTSSSSSSLLLLLLLLRRRRRRRRRRRFFFFFFFFFFFDDDDDDDDGGGGAAAAAIIIIIIIINNNNNNNNVVVVVVVDDDDDDDDVVVVVVVTTTTTTTEEEEEEEEEFFFFFFFFFFFQQQQQQQQQTTTTTTTNNNNNNNNLLLLLLLLVVVVVVVPPPPPPPYYYYYYYYYYYYPPPPPPPRRRRRRRRRRRIIIIIIIIHHHHHHHHHHFFFFFFFFFFFMMMMMMMMLLLLLLLLSSSSSSSSSSSSYYYYYYYYYYYYAAAAAPPPPPPPVVVVVVVIIIIIIIISSSSSSAAAAAEEEEEEEEEKKKKKKKKKAAAAAYYYYYYYYYYYYHHHHHHHHHHEEEEEEEEEQQQQQQQQQLLLLLLLLSSSSSSVVVVVVVPPPPPPPEEEEEEEEEIIIIIIIITTTTTTTNNNNNNNNAAAAAVVVVVVVFFFFFFFFFFFEEEEEEEEEPPPPPPPSSSSSSSSSSSSMMMMMMMMMMMMMMMMAAAAAKKKKKKKKKCCCCCCDDDDDDDDPPPPPPPRRRRRRRRRRRHHHHHHHHHHGGGGKKKKKKKKKYYYYYYYYYYYYMMMMMMMMAAAAACCCCCCCCCCCCLLLLLLLLMMMMMMMMYYYYYYYYYYYYRRRRRRRRRRRGGGGDDDDDDDDVVVVVVVVVVVVVVPPPPPPPKKKKKKKKKDDDDDDDDVVVVVVVNNNNNNNNAAAAAAAAAAVVVVVVVAAAAATTTTTTTIIIIIIIIKKKKKKKKKTTTTTTTKKKKKKKKKRRRRRRRRRRRTTTTTTTVVVVVVVQQQQQQQQQFFFFFFFFFFFVVVVVVVDDDDDDDDWWWWWWWWWWWWWWCCCCCCPPPPPPPTTTTTTTGGGGFFFFFFFFFFFKKKKKKKKKCCCCCCGGGGIIIIIIIINNNNNNNNYYYYYYYYYYYYQQQQQQQQQPPPPPPPPPPPPPPSSSSSSVVVVVVVVVVVVVVPPPPPPPGGGGGGGGDDDDDDDDLLLLLLLLAAAAAKKKKKKKKKVVVVVVVQQQQQQQQQRRRRRRRRRRRAAAAAVVVVVVVCCCCCCMMMMMMMMIIIIIIIISSSSSSNNNNNNNNNNNNNNNNTTTTTTTAAAAAVVVVVVVAAAAAEEEEEEEEEVVVVVVVFFFFFFFFFFFSSSSSSRRRRRRRRRRRIIIIIIIIDDDDDDDDHHHHHHHHHHKKKKKKKKKFFFFFFFFFFFDDDDDDDDLLLLLLLLMMMMMMMMYYYYYYYYYYYYAAAAAKKKKKKKKKRRRRRRRRRRRAAAAAFFFFFFFFFFFVVVVVVVHHHHHHHHHHWWWWWWWWWWWWWWYYYYYYYYYYYYVVVVVVVGGGGEEEEEEEEEGGGGMMMMMMMMEEEEEEEEEEEEEEEEEEGGGGEEEEEEEEEFFFFFFFFFFFSSSSSSEEEEEEEEEAAAAARRRRRRRRRRREEEEEEEEEDDDDDDDDLLLLLLLLAAAAAAAAAALLLLLLLLEEEEEEEEEKKKKKKKKKDDDDDDDDYYYYYYYYYYYYEEEEEEEEEEEEEEEEEEVVVVVVVGGGGAAAAAEEEEEEEEEGGGGAAAAADDDDDDDDDDDDDDDDEEEEEEEEEGGGGDDDDDDDDEEEEEEEEEGGGGEEEEEEEEEDDDDDDDDYYYYYYYYYYYYY

SEQ ID NO: 46 - protein, 3514 aa, Homarus americanus
MMMMMMMMRRRRRRRRRRREEEEEEEEECCCCCCIIIIIIIISSSSSSIIIIIIIIHHHHHHHHHHVVVVVVVGGGGQQQQQQQQQAAAAAGGGGAAAAAQQQQQQQQQMMMMMMMMGGGGNNNNNNNNAAAAACCCCCCWWWWWWWWWWWWWWEEEEEEEEELLLLLLLLYYYYYYYYYYYYCCCCCCLLLLLLLLEEEEEEEEEHHHHHHHHHHGGGGIIIIIIIIQQQQQQQQQPPPPPPPDDDDDDDDGGGGQQQQQQQQQMMMMMMMMPPPPPPPSSSSSSDDDDDDDDKKKKKKKKKTTTTTTTIIIIIIIIGGGGGGGGGGGGDDDDDDDDDDDDDDDDSSSSSSFFFFFFFFFFFNNNNNNNNTTTTTTTFFFFFFFFFFFFFFFFFFFFFFCCCCCCEEEEEEEEETTTTTTTGGGGAAAAAGGGGKKKKKKKKKHHHHHHHHHHVVVVVVVPPPPPPPRRRRRRRRRRRAAAAAVVVVVVVFFFFFFFFFFFVVVVVVVDDDDDDDDLLLLLLLLEEEEEEEEEPPPPPPPTTTTTTTVVVVVVVIIIIIIIIDDDDDDDDEEEEEEEEEIIIIIIIIRRRRRRRRRRRTTTTTTTGGGGVVVVVVVYYYYYYYYYYYYRRRRRRRRRRRQQQQQQQQQLLLLLLLLFFFFFFFFFFFHHHHHHHHHHPPPPPPPEEEEEEEEEQQQQQQQQQLLLLLLLLIIIIIIIITTTTTTTGGGGKKKKKKKKKEEEEEEEEEDDDDDDDDAAAAAAAAAANNNNNNNNNNNNNNNNYYYYYYYYYYYYAAAAARRRRRRRRRRRGGGGHHHHHHHHHHYYYYYYYYYYYYTTTTTTTIIIIIIIIGGGGKKKKKKKKKEEEEEEEEEIIIIIIIIVVVVVVVDDDDDDDDIIIIIIIIVVVVVVVLLLLLLLLDDDDDDDDRRRRRRRRRRRIIIIIIIIRRRRRRRRRRRKKKKKKKKKLLLLLLLLAAAAADDDDDDDDNNNNNNNNCCCCCCAAAAAGGGGLLLLLLLLQQQQQQQQQGGGGFFFFFFFFFFFLLLLLLLLIIIIIIIIFFFFFFFFFFFHHHHHHHHHHSSSSSSFFFFFFFFFFFGGGGGGGGGGGGTTTTTTTGGGGSSSSSSGGGGFFFFFFFFFFFTTTTTTTSSSSSSLLLLLLLLLLLLLLLLMMMMMMMMEEEEEEEEERRRRRRRRRRRLLLLLLLLSSSSSSVVVVVVVDDDDDDDDYYYYYYYYYYYYGGGGKKKKKKKKKKKKKKKKKKSSSSSSKKKKKKKKKLLLLLLLLEEEEEEEEEFFFFFFFFFFFAAAAAIIIIIIIIYYYYYYYYYYYYPPPPPPPAAAAAPPPPPPPQQQQQQQQQVVVVVVVAAAAATTTTTTTAAAAAVVVVVVVVVVVVVVEEEEEEEEEPPPPPPPYYYYYYYYYYYYNNNNNNNNSSSSSSIIIIIIIILLLLLLLLTTTTTTTTTTTTTTHHHHHHHHHHTTTTTTTTTTTTTTLLLLLLLLEEEEEEEEEHHHHHHHHHHSSSSSSDDDDDDDDCCCCCCAAAAAFFFFFFFFFFFMMMMMMMMVVVVVVVDDDDDDDDNNNNNNNNEEEEEEEEEAAAAAIIIIIIIIYYYYYYYYYYYYDDDDDDDDIIIIIIIICCCCCCRRRRRRRRRRRRRRRRRRRRRRNNNNNNNNLLLLLLLLDDDDDDDDIIIIIIIIEEEEEEEEERRRRRRRRRRRPPPPPPPTTTTTTTYYYYYYYYYYYYTTTTTTTNNNNNNNNLLLLLLLLNNNNNNNNRRRRRRRRRRRLLLLLLLLIIIIIIIIGGGGQQQQQQQQQIIIIIIIIVVVVVVVSSSSSSSSSSSSIIIIIIIITTTTTTTAAAAASSSSSSLLLLLLLLRRRRRRRRRRRFFFFFFFFFFFDDDDDDDDGGGGAAAAALLLLLLLLNNNNNNNNVVVVVVVDDDDDDDDLLLLLLLLTTTTTTTEEEEEEEEEFFFFFFFFFFFQQQQQQQQQTTTTTTTNNNNNNNNLLLLLLLLVVVVVVVPPPPPPPYYYYYYYYYYYYPPPPPPPRRRRRRRRRRRIIIIIIIIHHHHHHHHHHFFFFFFFFFFFPPPPPPPLLLLLLLLVVVVVVVTTTTTTTYYYYYYYYYYYYAAAAAPPPPPPPVVVVVVVIIIIIIIISSSSSSAAAAAEEEEEEEEEKKKKKKKKKAAAAAYYYYYYYYYYYYHHHHHHHHHHEEEEEEEEEQQQQQQQQQLLLLLLLLSSSSSSVVVVVVVSSSSSSEEEEEEEEEIIIIIIIITTTTTTTNNNNNNNNAAAAACCCCCCFFFFFFFFFFFEEEEEEEEEPPPPPPPAAAAANNNNNNNNQQQQQQQQQMMMMMMMMVVVVVVVKKKKKKKKKCCCCCCDDDDDDDDPPPPPPPRRRRRRRRRRRHHHHHHHHHHGGGGKKKKKKKKKYYYYYYYYYYYYMMMMMMMMAAAAACCCCCCCCCCCCLLLLLLLLLLLLLLLLYYYYYYYYYYYYRRRRRRRRRRRGGGGDDDDDDDDVVVVVVVVVVVVVVPPPPPPPKKKKKKKKKDDDDDDDDVVVVVVVNNNNNNNNAAAAAAAAAAIIIIIIIIAAAAATTTTTTTIIIIIIIIKKKKKKKKKTTTTTTTKKKKKKKKKRRRRRRRRRRRSSSSSSIIIIIIIIQQQQQQQQQFFFFFFFFFFFVVVVVVVDDDDDDDDWWWWWWWWWWWWWWCCCCCCPPPPPPPTTTTTTTGGGGFFFFFFFFFFFKKKKKKKKKVVVVVVVGGGGIIIIIIIINNNNNNNNYYYYYYYYYYYYQQQQQQQQQPPPPPPPPPPPPPPTTTTTTTAAAAAVVVVVVVPPPPPPPGGGGGGGGDDDDDDDDLLLLLLLLAAAAAKKKKKKKKKVVVVVVVSSSSSSRRRRRRRRRRRAAAAAVVVVVVVCCCCCCMMMMMMMMLLLLLLLLSSSSSSNNNNNNNNTTTTTTTTTTTTTTAAAAAIIIIIIIIAAAAAEEEEEEEEEAAAAAWWWWWWWWWWWWWWAAAAARRRRRRRRRRRLLLLLLLLDDDDDDDDHHHHHHHHHHKKKKKKKKKFFFFFFFFFFFDDDDDDDDLLLLLLLLMMMMMMMMYYYYYYYYYYYYAAAAAKKKKKKKKKRRRRRRRRRRRAAAAAFFFFFFFFFFFVVVVVVVHHHHHHHHHHWWWWWWWWWWWWWWYYYYYYYYYYYYVVVVVVVGGGGEEEEEEEEEGGGGMMMMMMMMEEEEEEEEEEEEEEEEEEGGGGEEEEEEEEEFFFFFFFFFFFTTTTTTTEEEEEEEEEAAAAARRRRRRRRRRREEEEEEEEEDDDDDDDDLLLLLLLLAAAAAAAAAALLLLLLLLEEEEEEEEEKKKKKKKKKDDDDDDDDYYYYYYYYYYYYEEEEEEEEEEEEEEEEEEVVVVVVVGGGGVVVVVVVDDDDDDDDSSSSSSAAAAADDDDDDDDAAAAAEEEEEEEEEGGGGEEEEEEEEEEEEEEEEEEEEEEEEEEEGGGGEEEEEEEEEEEEEEEEEEYYYYYYYYYYYYY

SEQ ID NO: 47 - protein, 3493 aa, Hordeum vulgare
MMMMMMMMRRRRRRRRRRREEEEEEEEECCCCCCIIIIIIIISSSSSSIIIIIIIIHHHHHHHHHHIIIIIIIIGGGGQQQQQQQQQAAAAAGGGGIIIIIIIIQQQQQQQQQVVVVVVVGGGGNNNNNNNNAAAAACCCCCCWWWWWWWWWWWWWWEEEEEEEEELLLLLLLLYYYYYYYYYYYYCCCCCCLLLLLLLLEEEEEEEEEHHHHHHHHHHGGGGIIIIIIIIQQQQQQQQQPPPPPPPDDDDDDDDGGGGQQQQQQQQQMMMMMMMMPPPPPPPGGGGDDDDDDDDKKKKKKKKKTTTTTTTVVVVVVVGGGGGGGGGGGGDDDDDDDDDDDDDDDDAAAAAFFFFFFFFFFFNNNNNNNNTTTTTTTFFFFFFFFFFFFFFFFFFFFFFSSSSSSEEEEEEEEETTTTTTTGGGGAAAAAGGGGKKKKKKKKKHHHHHHHHHHVVVVVVVPPPPPPPRRRRRRRRRRRAAAAAVVVVVVVFFFFFFFFFFFVVVVVVVDDDDDDDDLLLLLLLLEEEEEEEEEPPPPPPPTTTTTTTVVVVVVVIIIIIIIIDDDDDDDDEEEEEEEEEVVVVVVVRRRRRRRRRRRTTTTTTTGGGGTTTTTTTYYYYYYYYYYYYRRRRRRRRRRRQQQQQQQQQLLLLLLLLFFFFFFFFFFFHHHHHHHHHHPPPPPPPEEEEEEEEEQQQQQQQQQLLLLLLLLIIIIIIIISSSSSSGGGGKKKKKKKKKEEEEEEEEEDDDDDDDDAAAAAAAAAANNNNNNNNNNNNNNNNFFFFFFFFFFFAAAAARRRRRRRRRRRGGGGHHHHHHHHHHYYYYYYYYYYYYTTTTTTTIIIIIIIIGGGGKKKKKKKKKEEEEEEEEEIIIIIIIIVVVVVVVDDDDDDDDLLLLLLLLCCCCCCLLLLLLLLDDDDDDDDRRRRRRRRRRRIIIIIIIIRRRRRRRRRRRKKKKKKKKKLLLLLLLLAAAAADDDDDDDDNNNNNNNNCCCCCCTTTTTTTGGGGLLLLLLLLQQQQQQQQQGGGGFFFFFFFFFFFLLLLLLLLVVVVVVVFFFFFFFFFFFNNNNNNNNAAAAAVVVVVVVGGGGGGGGGGGGTTTTTTTGGGGSSSSSSGGGGLLLLLLLLGGGGSSSSSSLLLLLLLLLLLLLLLLLLLLLLLLEEEEEEEEERRRRRRRRRRRLLLLLLLLSSSSSSVVVVVVVDDDDDDDDYYYYYYYYYYYYGGGGKKKKKKKKKKKKKKKKKKSSSSSSKKKKKKKKKLLLLLLLLGGGGFFFFFFFFFFFTTTTTTTVVVVVVVYYYYYYYYYYYYPPPPPPPSSSSSSPPPPPPPQQQQQQQQQVVVVVVVSSSSSSTTTTTTTSSSSSSVVVVVVVVVVVVVVEEEEEEEEEPPPPPPPYYYYYYYYYYYYNNNNNNNNSSSSSSVVVVVVVLLLLLLLLSSSSSSTTTTTTTHHHHHHHHHHSSSSSSLLLLLLLLLLLLLLLLEEEEEEEEEHHHHHHHHHHTTTTTTTDDDDDDDDVVVVVVVAAAAAVVVVVVVLLLLLLLLLLLLLLLLDDDDDDDDNNNNNNNNEEEEEEEEEAAAAAIIIIIIIIYYYYYYYYYYYYDDDDDDDDIIIIIIIICCCCCCRRRRRRRRRRRRRRRRRRRRRRSSSSSSLLLLLLLLDDDDDDDDIIIIIIIIEEEEEEEEERRRRRRRRRRRPPPPPPPTTTTTTTYYYYYYYYYYYYTTTTTTTNNNNNNNNLLLLLLLLNNNNNNNNRRRRRRRRRRRLLLLLLLLVVVVVVVSSSSSSQQQQQQQQQVVVVVVVIIIIIIIISSSSSSSSSSSSLLLLLLLLTTTTTTTAAAAASSSSSSLLLLLLLLRRRRRRRRRRRFFFFFFFFFFFDDDDDDDDGGGGAAAAALLLLLLLLNNNNNNNNVVVVVVVDDDDDDDDVVVVVVVNNNNNNNNEEEEEEEEEFFFFFFFFFFFQQQQQQQQQTTTTTTTNNNNNNNNLLLLLLLLVVVVVVVPPPPPPPYYYYYYYYYYYYPPPPPPPRRRRRRRRRRRIIIIIIIIHHHHHHHHHHFFFFFFFFFFFMMMMMMMMLLLLLLLLSSSSSSSSSSSSYYYYYYYYYYYYAAAAAPPPPPPPVVVVVVVIIIIIIIISSSSSSAAAAAEEEEEEEEEKKKKKKKKKAAAAAYYYYYYYYYYYYHHHHHHHHHHEEEEEEEEEQQQQQQQQQLLLLLLLLSSSSSSVVVVVVVAAAAAEEEEEEEEEIIIIIIIITTTTTTTNNNNNNNNSSSSSSAAAAAFFFFFFFFFFFEEEEEEEEEPPPPPPPSSSSSSSSSSSSMMMMMMMMMMMMMMMMAAAAAKKKKKKKKKCCCCCCDDDDDDDDPPPPPPPRRRRRRRRRRRHHHHHHHHHHGGGGKKKKKKKKKYYYYYYYYYYYYMMMMMMMMAAAAACCCCCCCCCCCCLLLLLLLLMMMMMMMMYYYYYYYYYYYYRRRRRRRRRRRGGGGDDDDDDDDVVVVVVVVVVVVVVPPPPPPPKKKKKKKKKDDDDDDDDVVVVVVVNNNNNNNNAAAAAAAAAAVVVVVVVAAAAATTTTTTTIIIIIIIIKKKKKKKKKTTTTTTTKKKKKKKKKRRRRRRRRRRRTTTTTTTIIIIIIIIQQQQQQQQQFFFFFFFFFFFVVVVVVVDDDDDDDDWWWWWWWWWWWWWWCCCCCCPPPPPPPTTTTTTTGGGGFFFFFFFFFFFKKKKKKKKKCCCCCCGGGGIIIIIIIINNNNNNNNYYYYYYYYYYYYQQQQQQQQQPPPPPPPPPPPPPPSSSSSSVVVVVVVVVVVVVVPPPPPPPGGGGGGGGDDDDDDDDLLLLLLLLAAAAAKKKKKKKKKVVVVVVVQQQQQQQQQRRRRRRRRRRRAAAAAVVVVVVVCCCCCCMMMMMMMMIIIIIIIISSSSSSNNNNNNNNSSSSSSTTTTTTTSSSSSSVVVVVVVVVVVVVVEEEEEEEEEVVVVVVVFFFFFFFFFFFSSSSSSRRRRRRRRRRRIIIIIIIIDDDDDDDDHHHHHHHHHHKKKKKKKKKFFFFFFFFFFFDDDDDDDDLLLLLLLLMMMMMMMMYYYYYYYYYYYYAAAAAKKKKKKKKKRRRRRRRRRRRAAAAAFFFFFFFFFFFVVVVVVVHHHHHHHHHHWWWWWWWWWWWWWWYYYYYYYYYYYYVVVVVVVGGGGEEEEEEEEEGGGGMMMMMMMMEEEEEEEEEEEEEEEEEEGGGGEEEEEEEEEFFFFFFFFFFFSSSSSSEEEEEEEEEAAAAARRRRRRRRRRREEEEEEEEEDDDDDDDDLLLLLLLLAAAAAAAAAALLLLLLLLEEEEEEEEEKKKKKKKKKDDDDDDDDYYYYYYYYYYYYEEEEEEEEEEEEEEEEEEVVVVVVVGGGGAAAAAEEEEEEEEEFFFFFFFFFFFDDDDDDDDEEEEEEEEEGGGGEEEEEEEEEDDDDDDDDGGGGDDDDDDDDEEEEEEEEEGGGGDDDDDDDDEEEEEEEEEYYYYYYYYYYYYY

SEQ ID NO: 48 - protein, 3482 aa, Zea mays
MMMMMMMMRRRRRRRRRRREEEEEEEEECCCCCCIIIIIIIISSSSSSVVVVVVVHHHHHHHHHHIIIIIIIIGGGGQQQQQQQQQAAAAAGGGGIIIIIIIIQQQQQQQQQVVVVVVVGGGGNNNNNNNNAAAAACCCCCCWWWWWWWWWWWWWWEEEEEEEEELLLLLLLLYYYYYYYYYYYYCCCCCCLLLLLLLLEEEEEEEEEHHHHHHHHHHGGGGIIIIIIIIQQQQQQQQQPPPPPPPDDDDDDDDGGGGQQQQQQQQQVVVVVVVPPPPPPPGGGGDDDDDDDDKKKKKKKKKTTTTTTTAAAAAGGGGHHHHHHHHHHHHHHHHHHHHDDDDDDDDDDDDDDDDAAAAAFFFFFFFFFFFSSSSSSTTTTTTTFFFFFFFFFFFFFFFFFFFFFFSSSSSSQQQQQQQQQTTTTTTTGGGGAAAAAGGGGKKKKKKKKKHHHHHHHHHHVVVVVVVPPPPPPPRRRRRRRRRRRAAAAAIIIIIIIIFFFFFFFFFFFVVVVVVVDDDDDDDDLLLLLLLLEEEEEEEEEPPPPPPPTTTTTTTVVVVVVVIIIIIIIIDDDDDDDDEEEEEEEEEVVVVVVVRRRRRRRRRRRTTTTTTTGGGGTTTTTTTYYYYYYYYYYYYRRRRRRRRRRRQQQQQQQQQLLLLLLLLFFFFFFFFFFFHHHHHHHHHHPPPPPPPEEEEEEEEEQQQQQQQQQLLLLLLLLIIIIIIIISSSSSSGGGGKKKKKKKKKEEEEEEEEEDDDDDDDDAAAAAAAAAANNNNNNNNNNNNNNNNFFFFFFFFFFFAAAAARRRRRRRRRRRGGGGHHHHHHHHHHYYYYYYYYYYYYTTTTTTTIIIIIIIIGGGGKKKKKKKKKEEEEEEEEEIIIIIIIIVVVVVVVDDDDDDDDLLLLLLLLCCCCCCLLLLLLLLDDDDDDDDRRRRRRRRRRRIIIIIIIIRRRRRRRRRRRKKKKKKKKKLLLLLLLLAAAAADDDDDDDDNNNNNNNNCCCCCCTTTTTTTGGGGLLLLLLLLQQQQQQQQQGGGGFFFFFFFFFFFLLLLLLLLVVVVVVVFFFFFFFFFFFNNNNNNNNAAAAAVVVVVVVGGGGGGGGGGGGTTTTTTTGGGGSSSSSSGGGGLLLLLLLLGGGGSSSSSSLLLLLLLLLLLLLLLLLLLLLLLLEEEEEEEEERRRRRRRRRRRLLLLLLLLSSSSSSVVVVVVVEEEEEEEEEYYYYYYYYYYYYGGGGKKKKKKKKKKKKKKKKKKSSSSSSKKKKKKKKKLLLLLLLLGGGGFFFFFFFFFFFTTTTTTTVVVVVVVYYYYYYYYYYYYPPPPPPPSSSSSSPPPPPPPQQQQQQQQQVVVVVVVSSSSSSTTTTTTTSSSSSSVVVVVVVVVVVVVVEEEEEEEEEPPPPPPPYYYYYYYYYYYYNNNNNNNNSSSSSSVVVVVVVLLLLLLLLSSSSSSTTTTTTTHHHHHHHHHHSSSSSSLLLLLLLLLLLLLLLLEEEEEEEEEHHHHHHHHHHTTTTTTTDDDDDDDDVVVVVVVSSSSSSIIIIIIIILLLLLLLLLLLLLLLLDDDDDDDDNNNNNNNNEEEEEEEEEAAAAAIIIIIIIIYYYYYYYYYYYYDDDDDDDDIIIIIIIICCCCCCRRRRRRRRRRRRRRRRRRRRRRSSSSSSLLLLLLLLDDDDDDDDIIIIIIIIEEEEEEEEERRRRRRRRRRRPPPPPPPNNNNNNNNYYYYYYYYYYYYSSSSSSNNNNNNNNLLLLLLLLNNNNNNNNRRRRRRRRRRRLLLLLLLLVVVVVVVSSSSSSQQQQQQQQQVVVVVVVIIIIIIIISSSSSSSSSSSSLLLLLLLLTTTTTTTAAAAASSSSSSLLLLLLLLRRRRRRRRRRRFFFFFFFFFFFDDDDDDDDGGGGAAAAALLLLLLLLNNNNNNNNVVVVVVVDDDDDDDDVVVVVVVNNNNNNNNEEEEEEEEEFFFFFFFFFFFQQQQQQQQQTTTTTTTNNNNNNNNLLLLLLLLVVVVVVVPPPPPPPYYYYYYYYYYYYPPPPPPPRRRRRRRRRRRIIIIIIIIHHHHHHHHHHFFFFFFFFFFFMMMMMMMMLLLLLLLLSSSSSSSSSSSSYYYYYYYYYYYYAAAAAPPPPPPPVVVVVVVIIIIIIIISSSSSSSSSSSSAAAAAKKKKKKKKKAAAAAFFFFFFFFFFFHHHHHHHHHHEEEEEEEEEQQQQQQQQQLLLLLLLLSSSSSSVVVVVVVAAAAAEEEEEEEEEIIIIIIIITTTTTTTSSSSSSSSSSSSAAAAAFFFFFFFFFFFEEEEEEEEEPPPPPPPAAAAASSSSSSMMMMMMMMMMMMMMMMVVVVVVVKKKKKKKKKCCCCCCDDDDDDDDPPPPPPPRRRRRRRRRRRHHHHHHHHHHGGGGKKKKKKKKKYYYYYYYYYYYYMMMMMMMMAAAAACCCCCCCCCCCCLLLLLLLLMMMMMMMMYYYYYYYYYYYYRRRRRRRRRRRGGGGDDDDDDDDVVVVVVVVVVVVVVPPPPPPPKKKKKKKKKDDDDDDDDVVVVVVVNNNNNNNNAAAAAAAAAAVVVVVVVAAAAATTTTTTTIIIIIIIIKKKKKKKKKTTTTTTTKKKKKKKKKRRRRRRRRRRRTTTTTTTIIIIIIIIQQQQQQQQQFFFFFFFFFFFVVVVVVVDDDDDDDDWWWWWWWWWWWWWWCCCCCCPPPPPPPTTTTTTTGGGGFFFFFFFFFFFKKKKKKKKKCCCCCCGGGGIIIIIIIINNNNNNNNYYYYYYYYYYYYQQQQQQQQQAAAAAPPPPPPPTTTTTTTVVVVVVVVVVVVVVPPPPPPPGGGGAAAAADDDDDDDDLLLLLLLLAAAAAKKKKKKKKKVVVVVVVQQQQQQQQQRRRRRRRRRRRAAAAAVVVVVVVCCCCCCMMMMMMMMIIIIIIIISSSSSSNNNNNNNNSSSSSSTTTTTTTSSSSSSVVVVVVVVVVVVVVEEEEEEEEEVVVVVVVFFFFFFFFFFFSSSSSSRRRRRRRRRRRIIIIIIIINNNNNNNNSSSSSSKKKKKKKKKFFFFFFFFFFFDDDDDDDDLLLLLLLLMMMMMMMMYYYYYYYYYYYYAAAAAKKKKKKKKKRRRRRRRRRRRAAAAAFFFFFFFFFFFVVVVVVVHHHHHHHHHHWWWWWWWWWWWWWWYYYYYYYYYYYYVVVVVVVGGGGEEEEEEEEEGGGGMMMMMMMMEEEEEEEEEEEEEEEEEEGGGGEEEEEEEEEFFFFFFFFFFFSSSSSSEEEEEEEEEAAAAARRRRRRRRRRREEEEEEEEEDDDDDDDDLLLLLLLLAAAAAAAAAALLLLLLLLEEEEEEEEEKKKKKKKKKDDDDDDDDYYYYYYYYYYYYEEEEEEEEEEEEEEEEEEVVVVVVVAAAAAAAAAAEEEEEEEEEGGGGGGGGSSSSSSDDDDDDDDDDDDDDDDGGGGDDDDDDDDEEEEEEEEEEEEEEEEEEEEEEEEEEEEEEEEEEEEYYYYYYYYYYYYY

SEQ ID NO: 49 - protein, 3512 aa, Mus musculus; identical to SEQ ID NO: 34

SEQ ID NO: 50 - protein, 3494 aa, Saccharomyces cerevisiae
MMMMMMMMRRRRRRRRRRREEEEEEEEEVVVVVVVIIIIIIIISSSSSSIIIIIIIINNNNNNNNVVVVVVVGGGGQQQQQQQQQAAAAAGGGGCCCCCCQQQQQQQQQIIIIIIIIGGGGNNNNNNNNAAAAACCCCCCWWWWWWWWWWWWWWEEEEEEEEELLLLLLLLYYYYYYYYYYYYSSSSSSLLLLLLLLEEEEEEEEEHHHHHHHHHHGGGGIIIIIIIIKKKKKKKKKEEEEEEEEEDDDDDDDDGGGGHHHHHHHHHHLLLLLLLLEEEEEEEEEDDDDDDDDGGGGLLLLLLLLSSSSSSKKKKKKKKKPPPPPPPKKKKKKKKKGGGGGGGGEEEEEEEEEEEEEEEEEEGGGGFFFFFFFFFFFSSSSSSTTTTTTTFFFFFFFFFFFFFFFFFFFFFFHHHHHHHHHHEEEEEEEEETTTTTTTGGGGYYYYYYYYYYYYGGGGKKKKKKKKKFFFFFFFFFFFVVVVVVVPPPPPPPRRRRRRRRRRRAAAAAIIIIIIIIYYYYYYYYYYYYVVVVVVVDDDDDDDDLLLLLLLLEEEEEEEEEPPPPPPPNNNNNNNNVVVVVVVIIIIIIIIDDDDDDDDEEEEEEEEEVVVVVVVRRRRRRRRRRRTTTTTTTGGGGRRRRRRRRRRRFFFFFFFFFFFKKKKKKKKKEEEEEEEEELLLLLLLLFFFFFFFFFFFHHHHHHHHHHPPPPPPPEEEEEEEEEQQQQQQQQQLLLLLLLLIIIIIIIINNNNNNNNGGGGKKKKKKKKKEEEEEEEEEDDDDDDDDAAAAAAAAAANNNNNNNNNNNNNNNNYYYYYYYYYYYYAAAAARRRRRRRRRRRGGGGHHHHHHHHHHYYYYYYYYYYYYTTTTTTTVVVVVVVGGGGRRRRRRRRRRREEEEEEEEEIIIIIIIIVVVVVVVDDDDDDDDEEEEEEEEEVVVVVVVEEEEEEEEEEEEEEEEEERRRRRRRRRRRIIIIIIIIRRRRRRRRRRRKKKKKKKKKMMMMMMMMAAAAADDDDDDDDQQQQQQQQQCCCCCCDDDDDDDDGGGGLLLLLLLLQQQQQQQQQGGGGFFFFFFFFFFFLLLLLLLLFFFFFFFFFFFTTTTTTTHHHHHHHHHHSSSSSSLLLLLLLLGGGGGGGGGGGGTTTTTTTGGGGSSSSSSGGGGLLLLLLLLGGGGSSSSSSLLLLLLLLLLLLLLLLLLLLLLLLEEEEEEEEENNNNNNNNLLLLLLLLSSSSSSYYYYYYYYYYYYEEEEEEEEEYYYYYYYYYYYYGGGGKKKKKKKKKKKKKKKKKKSSSSSSKKKKKKKKKLLLLLLLLEEEEEEEEEFFFFFFFFFFFAAAAAVVVVVVVYYYYYYYYYYYYPPPPPPPAAAAAPPPPPPPQQQQQQQQQLLLLLLLLSSSSSSTTTTTTTSSSSSSVVVVVVVVVVVVVVEEEEEEEEEPPPPPPPYYYYYYYYYYYYNNNNNNNNTTTTTTTVVVVVVVLLLLLLLLTTTTTTTTTTTTTTHHHHHHHHHHTTTTTTTTTTTTTTLLLLLLLLEEEEEEEEEHHHHHHHHHHAAAAADDDDDDDDCCCCCCTTTTTTTFFFFFFFFFFFMMMMMMMMVVVVVVVDDDDDDDDNNNNNNNNEEEEEEEEEAAAAAIIIIIIIIYYYYYYYYYYYYDDDDDDDDIIIIIIIICCCCCCKKKKKKKKKRRRRRRRRRRRNNNNNNNNLLLLLLLLGGGGIIIIIIIISSSSSSRRRRRRRRRRRPPPPPPPSSSSSSFFFFFFFFFFFSSSSSSNNNNNNNNLLLLLLLLNNNNNNNNGGGGLLLLLLLLIIIIIIIIAAAAAQQQQQQQQQVVVVVVVIIIIIIIISSSSSSSSSSSSVVVVVVVTTTTTTTAAAAASSSSSSLLLLLLLLRRRRRRRRRRRFFFFFFFFFFFDDDDDDDDGGGGSSSSSSLLLLLLLLNNNNNNNNVVVVVVVDDDDDDDDLLLLLLLLNNNNNNNNEEEEEEEEEFFFFFFFFFFFQQQQQQQQQTTTTTTTNNNNNNNNLLLLLLLLVVVVVVVPPPPPPPYYYYYYYYYYYYPPPPPPPRRRRRRRRRRRIIIIIIIIHHHHHHHHHHFFFFFFFFFFFPPPPPPPLLLLLLLLVVVVVVVSSSSSSYYYYYYYYYYYYAAAAAPPPPPPPIIIIIIIILLLLLLLLSSSSSSKKKKKKKKKKKKKKKKKKRRRRRRRRRRRAAAAATTTTTTTHHHHHHHHHHEEEEEEEEESSSSSSNNNNNNNNSSSSSSVVVVVVVSSSSSSEEEEEEEEEIIIIIIIITTTTTTTNNNNNNNNAAAAACCCCCCFFFFFFFFFFFEEEEEEEEEPPPPPPPGGGGNNNNNNNNQQQQQQQQQMMMMMMMMVVVVVVVKKKKKKKKKCCCCCCDDDDDDDDPPPPPPPTTTTTTTKKKKKKKKKGGGGKKKKKKKKKYYYYYYYYYYYYMMMMMMMMAAAAANNNNNNNNCCCCCCLLLLLLLLLLLLLLLLYYYYYYYYYYYYRRRRRRRRRRRGGGGDDDDDDDDVVVVVVVVVVVVVVTTTTTTTRRRRRRRRRRRDDDDDDDDVVVVVVVQQQQQQQQQRRRRRRRRRRRAAAAAVVVVVVVEEEEEEEEEQQQQQQQQQVVVVVVVKKKKKKKKKNNNNNNNNKKKKKKKKKKKKKKKKKKTTTTTTTVVVVVVVQQQQQQQQQMMMMMMMMVVVVVVVDDDDDDDDWWWWWWWWWWWWWWCCCCCCPPPPPPPTTTTTTTGGGGFFFFFFFFFFFKKKKKKKKKIIIIIIIIGGGGIIIIIIIICCCCCCYYYYYYYYYYYYEEEEEEEEEPPPPPPPPPPPPPPSSSSSSVVVVVVVIIIIIIIIPPPPPPPSSSSSSSSSSSSEEEEEEEEELLLLLLLLAAAAANNNNNNNNVVVVVVVDDDDDDDDRRRRRRRRRRRAAAAAVVVVVVVCCCCCCMMMMMMMMLLLLLLLLSSSSSSNNNNNNNNTTTTTTTTTTTTTTAAAAAIIIIIIIIAAAAADDDDDDDDAAAAAWWWWWWWWWWWWWWKKKKKKKKKRRRRRRRRRRRIIIIIIIIDDDDDDDDQQQQQQQQQKKKKKKKKKFFFFFFFFFFFDDDDDDDDLLLLLLLLMMMMMMMMYYYYYYYYYYYYAAAAAKKKKKKKKKRRRRRRRRRRRAAAAAFFFFFFFFFFFVVVVVVVHHHHHHHHHHWWWWWWWWWWWWWWYYYYYYYYYYYYVVVVVVVGGGGEEEEEEEEEGGGGMMMMMMMMEEEEEEEEEEEEEEEEEEGGGGEEEEEEEEEFFFFFFFFFFFTTTTTTTEEEEEEEEEAAAAARRRRRRRRRRREEEEEEEEEDDDDDDDDLLLLLLLLAAAAAAAAAALLLLLLLLEEEEEEEEERRRRRRRRRRRDDDDDDDDYYYYYYYYYYYYIIIIIIIIEEEEEEEEEVVVVVVVGGGGAAAAADDDDDDDDSSSSSSYYYYYYYYYYYYAAAAAEEEEEEEEEEEEEEEEEEFFFFFFFFFFFF

SEQ ID NO: 51 - protein, 2523 aa, Gallus gallus
AAAAADDDDDDDDAAAAACCCCCCSSSSSSGGGGLLLLLLLLQQQQQQQQQGGGGFFFFFFFFFFFLLLLLLLLIIIIIIIIFFFFFFFFFFFHHHHHHHHHHSSSSSSFFFFFFFFFFFGGGGGGGGGGGGTTTTTTTGGGGSSSSSSGGGGFFFFFFFFFFFTTTTTTTSSSSSSLLLLLLLLLLLLLLLLMMMMMMMMEEEEEEEEERRRRRRRRRRRLLLLLLLLSSSSSSVVVVVVVDDDDDDDDYYYYYYYYYYYYGGGGKKKKKKKKKKKKKKKKKKSSSSSSKKKKKKKKKLLLLLLLLEEEEEEEEEFFFFFFFFFFFAAAAAIIIIIIIIYYYYYYYYYYYYPPPPPPPAAAAAPPPPPPPQQQQQQQQQVVVVVVVSSSSSSTTTTTTTAAAAAVVVVVVVVVVVVVVEEEEEEEEEPPPPPPPYYYYYYYYYYYYNNNNNNNNSSSSSSIIIIIIIILLLLLLLLTTTTTTTTTTTTTTHHHHHHHHHHTTTTTTTTTTTTTTLLLLLLLLEEEEEEEEEHHHHHHHHHHSSSSSSDDDDDDDDCCCCCCAAAAAFFFFFFFFFFFMMMMMMMMVVVVVVVDDDDDDDDNNNNNNNNEEEEEEEEEAAAAAIIIIIIIIYYYYYYYYYYYYDDDDDDDDIIIIIIIICCCCCCCCCCCCRRRRRRRRRRRNNNNNNNNLLLLLLLLDDDDDDDDIIIIIIIIEEEEEEEEERRRRRRRRRRRPPPPPPPTTTTTTTYYYYYYYYYYYYTTTTTTTNNNNNNNNLLLLLLLLNNNNNNNNRRRRRRRRRRRLLLLLLLLIIIIIIIISSSSSSQQQQQQQQQIIIIIIIIVVVVVVVSSSSSSSSSSSSIIIIIIIITTTTTTTAAAAASSSSSSLLLLLLLLRRRRRRRRRRRFFFFFFFFFFFDDDDDDDDGGGGAAAAALLLLLLLLNNNNNNNNVVVVVVVDDDDDDDDLLLLLLLLTTTTTTTEEEEEEEEEFFFFFFFFFFFQQQQQQQQQTTTTTTTNNNNNNNNLLLLLLLLVVVVVVVPPPPPPPYYYYYYYYYYYYPPPPPPPRRRRRRRRRRRIIIIIIIIHHHHHHHHHHFFFFFFFFFFFPPPPPPPLLLLLLLLVVVVVVVTTTTTTTYYYYYYYYYYYYAAAAAPPPPPPPIIIIIIIIIIIIIIIISSSSSSSSSSSSEEEEEEEEERRRRRRRRRRRAAAAAYYYYYYYYYYYYHHHHHHHHHHEEEEEEEEEQQQQQQQQQLLLLLLLLSSSSSSVVVVVVVAAAAAEEEEEEEEEIIIIIIIITTTTTTTSSSSSSSSSSSSCCCCCCFFFFFFFFFFFEEEEEEEEEPPPPPPPNNNNNNNNNNNNNNNNQQQQQQQQQMMMMMMMMVVVVVVVKKKKKKKKKCCCCCCDDDDDDDDPPPPPPPRRRRRRRRRRRHHHHHHHHHHGGGGKKKKKKKKKYYYYYYYYYYYYMMMMMMMMAAAAACCCCCCCCCCCCMMMMMMMMLLLLLLLLYYYYYYYYYYYYRRRRRRRRRRRGGGGDDDDDDDDVVVVVVVVVVVVVVPPPPPPPKKKKKKKKKDDDDDDDDVVVVVVVNNNNNNNNVVVVVVVAAAAAIIIIIIIIAAAAAAAAAAIIIIIIIIKKKKKKKKKTTTTTTTKKKKKKKKKRRRRRRRRRRRNNNNNNNNIIIIIIIIQQQQQQQQQFFFFFFFFFFFVVVVVVVDDDDDDDDWWWWWWWWWWWWWWCCCCCCPPPPPPPTTTTTTTGGGGVVVVVVVKKKKKKKKKVVVVVVVGGGGIIIIIIIINNNNNNNNYYYYYYYYYYYYQQQQQQQQQPPPPPPPPPPPPPPTTTTTTTVVVVVVVVVVVVVVPPPPPPPGGGGGGGGDDDDDDDDLLLLLLLLAAAAAQQQQQQQQQVVVVVVVQQQQQQQQQRRRRRRRRRRRAAAAAVVVVVVVCCCCCCMMMMMMMMLLLLLLLLSSSSSSNNNNNNNNTTTTTTTTTTTTTTAAAAAIIIIIIIIAAAAAEEEEEEEEEAAAAAWWWWWWWWWWWWWWAAAAARRRRRRRRRRRLLLLLLLLDDDDDDDDHHHHHHHHHHKKKKKKKKKFFFFFFFFFFFDDDDDDDDLLLLLLLLMMMMMMMMYYYYYYYYYYYYAAAAAKKKKKKKKKRRRRRRRRRRRAAAAAFFFFFFFFFFFVVVVVVVHHHHHHHHHHWWWWWWWWWWWWWWYYYYYYYYYYYYVVVVVVVSSSSSSEEEEEEEEEGGGGMMMMMMMMEEEEEEEEEEEEEEEEEEGGGGEEEEEEEEEFFFFFFFFFFFAAAAAEEEEEEEEEAAAAARRRRRRRRRRREEEEEEEEEDDDDDDDDLLLLLLLLAAAAAAAAAALLLLLLLLEEEEEEEEEKKKKKKKKKDDDDDDDDYYYYYYYYYYYYEEEEEEEEEEEEEEEEEEVVVVVVVGGGGTTTTTTTDDDDDDDDSSSSSSFFFFFFFFFFFEEEEEEEEEDDDDDDDDEEEEEEEEENNNNNNNNDDDDDDDDEEEEEEEEEEEEEEEEEEE

SEQ ID NO: 52 - protein, 3588 aa, Drosophila melanogaster
MMMMMMMMRRRRRRRRRRREEEEEEEEEVVVVVVVVVVVVVVSSSSSSIIIIIIIIQQQQQQQQQIIIIIIIIGGGGQQQQQQQQQCCCCCCGGGGIIIIIIIIQQQQQQQQQIIIIIIIIGGGGNNNNNNNNAAAAACCCCCCWWWWWWWWWWWWWWEEEEEEEEELLLLLLLLYYYYYYYYYYYYLLLLLLLLLLLLLLLLEEEEEEEEEHHHHHHHHHHGGGGIIIIIIIINNNNNNNNLLLLLLLLDDDDDDDDGGGGSSSSSSLLLLLLLLKKKKKKKKKTTTTTTTKKKKKKKKKEEEEEEEEEEEEEEEEEELLLLLLLLTTTTTTTAAAAASSSSSSGGGGSSSSSSSSSSSSAAAAASSSSSSVVVVVVVGGGGHHHHHHHHHHDDDDDDDDTTTTTTTSSSSSSAAAAANNNNNNNNDDDDDDDDAAAAARRRRRRRRRRRTTTTTTTFFFFFFFFFFFFFFFFFFFFFFTTTTTTTEEEEEEEEETTTTTTTGGGGNNNNNNNNGGGGKKKKKKKKKQQQQQQQQQVVVVVVVPPPPPPPRRRRRRRRRRRSSSSSSIIIIIIIIFFFFFFFFFFFVVVVVVVDDDDDDDDLLLLLLLLEEEEEEEEEPPPPPPPTTTTTTTVVVVVVVIIIIIIIIDDDDDDDDDDDDDDDDVVVVVVVRRRRRRRRRRRNNNNNNNNGGGGCCCCCCMMMMMMMMRRRRRRRRRRREEEEEEEEELLLLLLLLYYYYYYYYYYYYHHHHHHHHHHPPPPPPPEEEEEEEEEQQQQQQQQQLLLLLLLLIIIIIIIISSSSSSGGGGKKKKKKKKKEEEEEEEEEDDDDDDDDAAAAAAAAAANNNNNNNNNNNNNNNNYYYYYYYYYYYYAAAAARRRRRRRRRRRGGGGRRRRRRRRRRRYYYYYYYYYYYYSSSSSSIIIIIIIIGGGGKKKKKKKKKEEEEEEEEEVVVVVVVIIIIIIIIDDDDDDDDRRRRRRRRRRRVVVVVVVTTTTTTTSSSSSSRRRRRRRRRRRLLLLLLLLQQQQQQQQQKKKKKKKKKIIIIIIIIAAAAAEEEEEEEEEQQQQQQQQQCCCCCCDDDDDDDDSSSSSSLLLLLLLLQQQQQQQQQGGGGFFFFFFFFFFFLLLLLLLLIIIIIIIIFFFFFFFFFFFHHHHHHHHHHSSSSSSLLLLLLLLGGGGGGGGGGGGTTTTTTTGGGGSSSSSSGGGGFFFFFFFFFFFTTTTTTTSSSSSSLLLLLLLLLLLLLLLLVVVVVVVEEEEEEEEERRRRRRRRRRRLLLLLLLLSSSSSSTTTTTTTDDDDDDDDYYYYYYYYYYYYSSSSSSKKKKKKKKKKKKKKKKKKCCCCCCKKKKKKKKKLLLLLLLLDDDDDDDDFFFFFFFFFFFAAAAAVVVVVVVYYYYYYYYYYYYPPPPPPPSSSSSSPPPPPPPKKKKKKKKKVVVVVVVSSSSSSTTTTTTTAAAAAVVVVVVVVVVVVVVEEEEEEEEEPPPPPPPYYYYYYYYYYYYNNNNNNNNAAAAALLLLLLLLLLLLLLLLTTTTTTTTTTTTTTHHHHHHHHHHSSSSSSTTTTTTTMMMMMMMMDDDDDDDDHHHHHHHHHHSSSSSSDDDDDDDDCCCCCCVVVVVVVFFFFFFFFFFFMMMMMMMMVVVVVVVDDDDDDDDNNNNNNNNEEEEEEEEEAAAAAIIIIIIIIYYYYYYYYYYYYDDDDDDDDIIIIIIIICCCCCCNNNNNNNNNNNNNNNNSSSSSSLLLLLLLLGGGGVVVVVVVDDDDDDDDRRRRRRRRRRRPPPPPPPAAAAAYYYYYYYYYYYYRRRRRRRRRRRNNNNNNNNLLLLLLLLNNNNNNNNRRRRRRRRRRRLLLLLLLLIIIIIIIIAAAAAQQQQQQQQQIIIIIIIIVVVVVVVSSSSSSSSSSSSTTTTTTTTTTTTTTAAAAASSSSSSLLLLLLLLRRRRRRRRRRRFFFFFFFFFFFSSSSSSGGGGSSSSSSMMMMMMMMNNNNNNNNVVVVVVVDDDDDDDDLLLLLLLLNNNNNNNNEEEEEEEEEFFFFFFFFFFFQQQQQQQQQTTTTTTTNNNNNNNNLLLLLLLLVVVVVVVPPPPPPPFFFFFFFFFFFPPPPPPPRRRRRRRRRRRIIIIIIIIHHHHHHHHHHFFFFFFFFFFFPPPPPPPLLLLLLLLVVVVVVVAAAAAYYYYYYYYYYYYAAAAAPPPPPPPLLLLLLLLMMMMMMMMSSSSSSAAAAAEEEEEEEEERRRRRRRRRRRSSSSSSAAAAAHHHHHHHHHHEEEEEEEEEQQQQQQQQQHHHHHHHHHHAAAAAIIIIIIIITTTTTTTTTTTTTTLLLLLLLLTTTTTTTNNNNNNNNAAAAACCCCCCFFFFFFFFFFFEEEEEEEEESSSSSSSSSSSSNNNNNNNNMMMMMMMMMMMMMMMMVVVVVVVKKKKKKKKKCCCCCCDDDDDDDDPPPPPPPRRRRRRRRRRRAAAAAGGGGKKKKKKKKKFFFFFFFFFFFMMMMMMMMAAAAACCCCCCCCCCCCMMMMMMMMLLLLLLLLYYYYYYYYYYYYRRRRRRRRRRRGGGGDDDDDDDDVVVVVVVVVVVVVVPPPPPPPKKKKKKKKKDDDDDDDDVVVVVVVNNNNNNNNAAAAAAAAAAVVVVVVVSSSSSSAAAAAIIIIIIIIKKKKKKKKKSSSSSSKKKKKKKKKRRRRRRRRRRRHHHHHHHHHHIIIIIIIIQQQQQQQQQFFFFFFFFFFFVVVVVVVDDDDDDDDWWWWWWWWWWWWWWCCCCCCPPPPPPPTTTTTTTGGGGFFFFFFFFFFFKKKKKKKKKIIIIIIIIGGGGIIIIIIIINNNNNNNNYYYYYYYYYYYYEEEEEEEEEKKKKKKKKKPPPPPPPAAAAAFFFFFFFFFFFVVVVVVVPPPPPPPDDDDDDDDGGGGDDDDDDDDLLLLLLLLAAAAAKKKKKKKKKTTTTTTTSSSSSSRRRRRRRRRRRAAAAACCCCCCCCCCCCMMMMMMMMLLLLLLLLSSSSSSNNNNNNNNTTTTTTTTTTTTTTAAAAAIIIIIIIISSSSSSVVVVVVVAAAAAFFFFFFFFFFFSSSSSSNNNNNNNNLLLLLLLLSSSSSSYYYYYYYYYYYYKKKKKKKKKFFFFFFFFFFFDDDDDDDDLLLLLLLLMMMMMMMMFFFFFFFFFFFKKKKKKKKKKKKKKKKKKRRRRRRRRRRRAAAAAFFFFFFFFFFFVVVVVVVHHHHHHHHHHWWWWWWWWWWWWWWYYYYYYYYYYYYVVVVVVVGGGGEEEEEEEEEGGGGMMMMMMMMEEEEEEEEEEEEEEEEEEGGGGEEEEEEEEEFFFFFFFFFFFTTTTTTTEEEEEEEEEAAAAARRRRRRRRRRREEEEEEEEENNNNNNNNIIIIIIIIAAAAAVVVVVVVLLLLLLLLEEEEEEEEERRRRRRRRRRRDDDDDDDDFFFFFFFFFFFEEEEEEEEEEEEEEEEEEVVVVVVVGGGGLLLLLLLLDDDDDDDDNNNNNNNNAAAAAEEEEEEEEEEEEEEEEEEGGGGGGGGDDDDDDDDEEEEEEEEEDDDDDDDDFFFFFFFFFFFDDDDDDDDEEEEEEEEEFFFFFFFFFFFF

SEQ ID NO: 53 - protein, 3507 aa, Homo sapiens
MMMMMMMMRRRRRRRRRRREEEEEEEEECCCCCCIIIIIIIISSSSSSVVVVVVVHHHHHHHHHHVVVVVVVGGGGQQQQQQQQQAAAAAGGGGVVVVVVVQQQQQQQQQMMMMMMMMGGGGNNNNNNNNAAAAACCCCCCWWWWWWWWWWWWWWEEEEEEEEELLLLLLLLYYYYYYYYYYYYCCCCCCLLLLLLLLEEEEEEEEEHHHHHHHHHHGGGGIIIIIIIIQQQQQQQQQPPPPPPPDDDDDDDDGGGGQQQQQQQQQMMMMMMMMPPPPPPPSSSSSSDDDDDDDDKKKKKKKKKTTTTTTTIIIIIIIIGGGGGGGGGGGGDDDDDDDDDDDDDDDDSSSSSSFFFFFFFFFFFTTTTTTTTTTTTTTFFFFFFFFFFFFFFFFFFFFFFCCCCCCEEEEEEEEETTTTTTTGGGGAAAAAGGGGKKKKKKKKKHHHHHHHHHHVVVVVVVPPPPPPPRRRRRRRRRRRAAAAAVVVVVVVFFFFFFFFFFFVVVVVVVDDDDDDDDLLLLLLLLEEEEEEEEEPPPPPPPTTTTTTTVVVVVVVIIIIIIIIDDDDDDDDEEEEEEEEEIIIIIIIIRRRRRRRRRRRNNNNNNNNGGGGPPPPPPPYYYYYYYYYYYYRRRRRRRRRRRQQQQQQQQQLLLLLLLLFFFFFFFFFFFHHHHHHHHHHPPPPPPPEEEEEEEEEQQQQQQQQQLLLLLLLLIIIIIIIITTTTTTTGGGGKKKKKKKKKEEEEEEEEEDDDDDDDDAAAAAAAAAANNNNNNNNNNNNNNNNYYYYYYYYYYYYAAAAARRRRRRRRRRRGGGGHHHHHHHHHHYYYYYYYYYYYYTTTTTTTIIIIIIIIGGGGKKKKKKKKKEEEEEEEEEIIIIIIIIIIIIIIIIDDDDDDDDPPPPPPPVVVVVVVLLLLLLLLDDDDDDDDRRRRRRRRRRRIIIIIIIIRRRRRRRRRRRKKKKKKKKKLLLLLLLLSSSSSSDDDDDDDDQQQQQQQQQCCCCCCTTTTTTTGGGGLLLLLLLLQQQQQQQQQGGGGFFFFFFFFFFFLLLLLLLLVVVVVVVFFFFFFFFFFFHHHHHHHHHHSSSSSSFFFFFFFFFFFGGGGGGGGGGGGTTTTTTTGGGGSSSSSSGGGGFFFFFFFFFFFTTTTTTTSSSSSSLLLLLLLLLLLLLLLLMMMMMMMMEEEEEEEEERRRRRRRRRRRLLLLLLLLSSSSSSVVVVVVVDDDDDDDDYYYYYYYYYYYYGGGGKKKKKKKKKKKKKKKKKKSSSSSSKKKKKKKKKLLLLLLLLEEEEEEEEEFFFFFFFFFFFSSSSSSIIIIIIIIYYYYYYYYYYYYPPPPPPPAAAAAPPPPPPPQQQQQQQQQVVVVVVVSSSSSSTTTTTTTAAAAAVVVVVVVVVVVVVVEEEEEEEEEPPPPPPPYYYYYYYYYYYYNNNNNNNNSSSSSSIIIIIIIILLLLLLLLTTTTTTTTTTTTTTHHHHHHHHHHTTTTTTTTTTTTTTLLLLLLLLEEEEEEEEEHHHHHHHHHHSSSSSSDDDDDDDDCCCCCCAAAAAFFFFFFFFFFFMMMMMMMMVVVVVVVDDDDDDDDNNNNNNNNEEEEEEEEEAAAAAIIIIIIIIYYYYYYYYYYYYDDDDDDDDIIIIIIIICCCCCCRRRRRRRRRRRRRRRRRRRRRRNNNNNNNNLLLLLLLLDDDDDDDDIIIIIIIIEEEEEEEEERRRRRRRRRRRPPPPPPPTTTTTTTYYYYYYYYYYYYTTTTTTTNNNNNNNNLLLLLLLLNNNNNNNNRRRRRRRRRRRLLLLLLLLIIIIIIIISSSSSSQQQQQQQQQIIIIIIIIVVVVVVVSSSSSSSSSSSSIIIIIIIITTTTTTTAAAAASSSSSSLLLLLLLLRRRRRRRRRRRFFFFFFFFFFFDDDDDDDDGGGGAAAAALLLLLLLLNNNNNNNNVVVVVVVDDDDDDDDLLLLLLLLTTTTTTTEEEEEEEEEFFFFFFFFFFFQQQQQQQQQTTTTTTTNNNNNNNNLLLLLLLLVVVVVVVPPPPPPPYYYYYYYYYYYYPPPPPPPRRRRRRRRRRRIIIIIIIIHHHHHHHHHHFFFFFFFFFFFPPPPPPPLLLLLLLLAAAAATTTTTTTYYYYYYYYYYYYAAAAAPPPPPPPVVVVVVVIIIIIIIISSSSSSAAAAAEEEEEEEEEKKKKKKKKKAAAAAYYYYYYYYYYYYHHHHHHHHHHEEEEEEEEEQQQQQQQQQLLLLLLLLSSSSSSVVVVVVVAAAAAEEEEEEEEEIIIIIIIITTTTTTTNNNNNNNNAAAAACCCCCCFFFFFFFFFFFEEEEEEEEEPPPPPPPAAAAANNNNNNNNQQQQQQQQQMMMMMMMMVVVVVVVKKKKKKKKKCCCCCCDDDDDDDDPPPPPPPRRRRRRRRRRRHHHHHHHHHHGGGGKKKKKKKKKYYYYYYYYYYYYMMMMMMMMAAAAACCCCCCCCCCCCLLLLLLLLLLLLLLLLYYYYYYYYYYYYRRRRRRRRRRRGGGGDDDDDDDDVVVVVVVVVVVVVVPPPPPPPKKKKKKKKKDDDDDDDDVVVVVVVNNNNNNNNAAAAAAAAAAIIIIIIIIAAAAAAAAAAIIIIIIIIKKKKKKKKKTTTTTTTKKKKKKKKKRRRRRRRRRRRSSSSSSIIIIIIIIQQQQQQQQQFFFFFFFFFFFVVVVVVVDDDDDDDDWWWWWWWWWWWWWWCCCCCCPPPPPPPTTTTTTTGGGGFFFFFFFFFFFKKKKKKKKKVVVVVVVGGGGIIIIIIIINNNNNNNNYYYYYYYYYYYYQQQQQQQQQPPPPPPPPPPPPPPTTTTTTTVVVVVVVVVVVVVVPPPPPPPGGGGGGGGDDDDDDDDLLLLLLLLAAAAAKKKKKKKKKVVVVVVVQQQQQQQQQRRRRRRRRRRRAAAAAVVVVVVVCCCCCCMMMMMMMMLLLLLLLLSSSSSSNNNNNNNNTTTTTTTTTTTTTTAAAAAIIIIIIIIAAAAAEEEEEEEEEAAAAAWWWWWWWWWWWWWWAAAAARRRRRRRRRRRLLLLLLLLDDDDDDDDHHHHHHHHHHKKKKKKKKKFFFFFFFFFFFDDDDDDDDLLLLLLLLMMMMMMMMYYYYYYYYYYYYAAAAAKKKKKKKKKRRRRRRRRRRRAAAAAFFFFFFFFFFFVVVVVVVHHHHHHHHHHWWWWWWWWWWWWWWYYYYYYYYYYYYVVVVVVVGGGGEEEEEEEEEGGGGMMMMMMMMEEEEEEEEEEEEEEEEEEGGGGEEEEEEEEEFFFFFFFFFFFSSSSSSEEEEEEEEEAAAAARRRRRRRRRRREEEEEEEEEDDDDDDDDMMMMMMMMAAAAAAAAAALLLLLLLLEEEEEEEEEKKKKKKKKKDDDDDDDDYYYYYYYYYYYYEEEEEEEEEEEEEEEEEEVVVVVVVGGGGIIIIIIIIDDDDDDDDSSSSSSYYYYYYYYYYYYEEEEEEEEEDDDDDDDDEEEEEEEEEDDDDDDDDEEEEEEEEEGGGGEEEEEEEEEEEEEEEEEEE

SEQ ID NO: 54 - protein, 455 aa, Zea mays
MMMMMMMMRRRRRRRRRRREEEEEEEEECCCCCCIIIIIIIISSSSSSIIIIIIIIHHHHHHHHHHIIIIIIIIGGGGQQQQQQQQQAAAAAGGGGIIIIIIIIQQQQQQQQQVVVVVVVGGGGNNNNNNNNAAAAACCCCCCWWWWWWWWWWWWWWEEEEEEEEELLLLLLLLYYYYYYYYYYYYCCCCCCLLLLLLLLEEEEEEEEEHHHHHHHHHHGGGGIIIIIIIIQQQQQQQQQAAAAADDDDDDDDGGGGQQQQQQQQQMMMMMMMMPPPPPPPGGGGDDDDDDDDKKKKKKKKKTTTTTTTIIIIIIIIGGGGGGGGGGGGDDDDDDDDAAAAAEEEEEEEEEFFFFFFFFFFFDDDDDDDDEEEEEEEEEGGGGEEEEEEEEEDDDDDDDDGGGGDDDDDDDDEEEEEEEEEGGGGDDDDDDDDEEEEEEEEEYYYYYYYYYYYYY

SEQ ID NO: 55 - protein, 3508 aa, Gallus gallus
MMMMMMMMRRRRRRRRRRREEEEEEEEECCCCCCIIIIIIIISSSSSSVVVVVVVHHHHHHHHHHVVVVVVVGGGGQQQQQQQQQAAAAAGGGGVVVVVVVQQQQQQQQQMMMMMMMMGGGGNNNNNNNNTTTTTTTCCCCCCWWWWWWWWWWWWWWEEEEEEEEELLLLLLLLYYYYYYYYYYYYCCCCCCLLLLLLLLEEEEEEEEEHHHHHHHHHHGGGGIIIIIIIIQQQQQQQQQPPPPPPPDDDDDDDDGGGGQQQQQQQQQMMMMMMMMPPPPPPPSSSSSSDDDDDDDDKKKKKKKKKTTTTTTTIIIIIIIIGGGGGGGGGGGGDDDDDDDDDDDDDDDDSSSSSSFFFFFFFFFFFTTTTTTTTTTTTTTFFFFFFFFFFFFFFFFFFFFFFCCCCCCEEEEEEEEETTTTTTTGGGGAAAAAGGGGKKKKKKKKKHHHHHHHHHHVVVVVVVPPPPPPPRRRRRRRRRRRAAAAAIIIIIIIIFFFFFFFFFFFVVVVVVVDDDDDDDDLLLLLLLLEEEEEEEEEPPPPPPPTTTTTTTVVVVVVVIIIIIIIIDDDDDDDDEEEEEEEEEVVVVVVVRRRRRRRRRRRAAAAAGGGGIIIIIIIIYYYYYYYYYYYYRRRRRRRRRRRQQQQQQQQQLLLLLLLLFFFFFFFFFFFHHHHHHHHHHPPPPPPPEEEEEEEEEQQQQQQQQQLLLLLLLLIIIIIIIITTTTTTTGGGGKKKKKKKKKEEEEEEEEEDDDDDDDDGGGGAAAAANNNNNNNNNNNNNNNNYYYYYYYYYYYYAAAAARRRRRRRRRRRGGGGHHHHHHHHHHYYYYYYYYYYYYTTTTTTTIIIIIIIIGGGGKKKKKKKKKEEEEEEEEEIIIIIIIIIIIIIIIIDDDDDDDDQQQQQQQQQVVVVVVVLLLLLLLLDDDDDDDDRRRRRRRRRRRIIIIIIIIRRRRRRRRRRRKKKKKKKKKLLLLLLLLAAAAADDDDDDDDQQQQQQQQQCCCCCCTTTTTTTGGGGLLLLLLLLQQQQQQQQQGGGGFFFFFFFFFFFLLLLLLLLCCCCCCFFFFFFFFFFFHHHHHHHHHHSSSSSSFFFFFFFFFFFGGGGGGGGGGGGTTTTTTTGGGGSSSSSSGGGGFFFFFFFFFFFTTTTTTTSSSSSSLLLLLLLLLLLLLLLLMMMMMMMMEEEEEEEEERRRRRRRRRRRLLLLLLLLSSSSSSGGGGDDDDDDDDYYYYYYYYYYYYGGGGKKKKKKKKKKKKKKKKKKSSSSSSKKKKKKKKKLLLLLLLLEEEEEEEEEFFFFFFFFFFFSSSSSSIIIIIIIIYYYYYYYYYYYYPPPPPPPAAAAAPPPPPPPQQQQQQQQQVVVVVVVSSSSSSTTTTTTTAAAAAVVVVVVVVVVVVVVEEEEEEEEEPPPPPPPYYYYYYYYYYYYNNNNNNNNSSSSSSIIIIIIIILLLLLLLLTTTTTTTTTTTTTTHHHHHHHHHHTTTTTTTTTTTTTTLLLLLLLLEEEEEEEEEHHHHHHHHHHSSSSSSDDDDDDDDCCCCCCAAAAAFFFFFFFFFFFMMMMMMMMVVVVVVVDDDDDDDDNNNNNNNNEEEEEEEEEAAAAAIIIIIIIIYYYYYYYYYYYYDDDDDDDDIIIIIIIICCCCCCRRRRRRRRRRRRRRRRRRRRRRNNNNNNNNLLLLLLLLDDDDDDDDIIIIIIIIEEEEEEEEERRRRRRRRRRRPPPPPPPTTTTTTTYYYYYYYYYYYYTTTTTTTNNNNNNNNLLLLLLLLNNNNNNNNRRRRRRRRRRRLLLLLLLLIIIIIIIISSSSSSQQQQQQQQQIIIIIIIIVVVVVVVSSSSSSSSSSSSIIIIIIIITTTTTTTAAAAASSSSSSLLLLLLLLRRRRRRRRRRRFFFFFFFFFFFDDDDDDDDGGGGAAAAALLLLLLLLNNNNNNNNVVVVVVVDDDDDDDDLLLLLLLLTTTTTTTEEEEEEEEEFFFFFFFFFFFQQQQQQQQQTTTTTTTNNNNNNNNLLLLLLLLVVVVVVVPPPPPPPYYYYYYYYYYYYPPPPPPPRRRRRRRRRRRIIIIIIIIHHHHHHHHHHFFFFFFFFFFFPPPPPPPLLLLLLLLAAAAATTTTTTTYYYYYYYYYYYYAAAAAPPPPPPPVVVVVVVIIIIIIIISSSSSSAAAAAEEEEEEEEEKKKKKKKKKAAAAAYYYYYYYYYYYYHHHHHHHHHHEEEEEEEEEQQQQQQQQQLLLLLLLLSSSSSSVVVVVVVAAAAAEEEEEEEEEIIIIIIIITTTTTTTNNNNNNNNSSSSSSCCCCCCFFFFFFFFFFFEEEEEEEEEPPPPPPPAAAAANNNNNNNNQQQQQQQQQMMMMMMMMVVVVVVVKKKKKKKKKCCCCCCDDDDDDDDPPPPPPPRRRRRRRRRRRHHHHHHHHHHGGGGKKKKKKKKKYYYYYYYYYYYYMMMMMMMMAAAAACCCCCCCCCCCCLLLLLLLLLLLLLLLLYYYYYYYYYYYYRRRRRRRRRRRGGGGDDDDDDDDVVVVVVVVVVVVVVPPPPPPPKKKKKKKKKDDDDDDDDVVVVVVVNNNNNNNNAAAAAAAAAAIIIIIIIIAAAAATTTTTTTIIIIIIIIKKKKKKKKKTTTTTTTKKKKKKKKKRRRRRRRRRRRSSSSSSIIIIIIIIQQQQQQQQQFFFFFFFFFFFVVVVVVVDDDDDDDDWWWWWWWWWWWWWWCCCCCCPPPPPPPTTTTTTTGGGGFFFFFFFFFFFKKKKKKKKKVVVVVVVGGGGIIIIIIIINNNNNNNNYYYYYYYYYYYYQQQQQQQQQPPPPPPPPPPPPPPTTTTTTTVVVVVVVVVVVVVVAAAAAGGGGGGGGDDDDDDDDLLLLLLLLAAAAAKKKKKKKKKVVVVVVVQQQQQQQQQRRRRRRRRRRRIIIIIIIIVVVVVVVCCCCCCMMMMMMMMLLLLLLLLSSSSSSNNNNNNNNTTTTTTTTTTTTTTAAAAAIIIIIIIIAAAAAEEEEEEEEEAAAAAWWWWWWWWWWWWWWAAAAARRRRRRRRRRRLLLLLLLLDDDDDDDDHHHHHHHHHHKKKKKKKKKFFFFFFFFFFFDDDDDDDDLLLLLLLLMMMMMMMMYYYYYYYYYYYYAAAAAKKKKKKKKKRRRRRRRRRRRAAAAAFFFFFFFFFFFVVVVVVVHHHHHHHHHHWWWWWWWWWWWWWWYYYYYYYYYYYYVVVVVVVGGGGEEEEEEEEEGGGGMMMMMMMMEEEEEEEEEEEEEEEEEEGGGGEEEEEEEEEFFFFFFFFFFFSSSSSSEEEEEEEEEAAAAARRRRRRRRRRREEEEEEEEEDDDDDDDDIIIIIIIIAAAAAAAAAALLLLLLLLEEEEEEEEEKKKKKKKKKDDDDDDDDYYYYYYYYYYYYEEEEEEEEEEEEEEEEEEVVVVVVVGGGGLLLLLLLLDDDDDDDDSSSSSSYYYYYYYYYYYYEEEEEEEEEDDDDDDDDEEEEEEEEEEEEEEEEEEEEEEEEEEEGGGGEEEEEEEEEEEEEEEEEEE

SEQ ID NO: 56 - protein, 3487 aa, Zea mays
MMMMMMMMRRRRRRRRRRREEEEEEEEEIIIIIIIIIIIIIIIISSSSSSIIIIIIIIHHHHHHHHHHIIIIIIIIGGGGQQQQQQQQQAAAAAGGGGIIIIIIIIQQQQQQQQQVVVVVVVGGGGNNNNNNNNAAAAACCCCCCWWWWWWWWWWWWWWEEEEEEEEELLLLLLLLYYYYYYYYYYYYCCCCCCLLLLLLLLEEEEEEEEEHHHHHHHHHHGGGGIIIIIIIIEEEEEEEEEHHHHHHHHHHDDDDDDDDGGGGTTTTTTTMMMMMMMMPPPPPPPSSSSSSDDDDDDDDSSSSSSSSSSSSVVVVVVVGGGGVVVVVVVAAAAAHHHHHHHHHHDDDDDDDDAAAAAFFFFFFFFFFFNNNNNNNNTTTTTTTFFFFFFFFFFFFFFFFFFFFFFSSSSSSEEEEEEEEETTTTTTTGGGGSSSSSSGGGGKKKKKKKKKHHHHHHHHHHVVVVVVVPPPPPPPRRRRRRRRRRRAAAAAIIIIIIIIFFFFFFFFFFFVVVVVVVDDDDDDDDLLLLLLLLEEEEEEEEEPPPPPPPTTTTTTTVVVVVVVIIIIIIIIDDDDDDDDEEEEEEEEEVVVVVVVRRRRRRRRRRRTTTTTTTGGGGSSSSSSYYYYYYYYYYYYRRRRRRRRRRRQQQQQQQQQLLLLLLLLFFFFFFFFFFFHHHHHHHHHHPPPPPPPEEEEEEEEEQQQQQQQQQLLLLLLLLIIIIIIIISSSSSSGGGGKKKKKKKKKEEEEEEEEEDDDDDDDDAAAAAAAAAANNNNNNNNNNNNNNNNFFFFFFFFFFFAAAAARRRRRRRRRRRGGGGHHHHHHHHHHYYYYYYYYYYYYTTTTTTTVVVVVVVGGGGKKKKKKKKKEEEEEEEEEIIIIIIIIVVVVVVVDDDDDDDDLLLLLLLLCCCCCCLLLLLLLLDDDDDDDDRRRRRRRRRRRVVVVVVVRRRRRRRRRRRKKKKKKKKKLLLLLLLLAAAAADDDDDDDDNNNNNNNNCCCCCCTTTTTTTGGGGLLLLLLLLQQQQQQQQQGGGGFFFFFFFFFFFLLLLLLLLVVVVVVVFFFFFFFFFFFNNNNNNNNAAAAAVVVVVVVGGGGGGGGGGGGTTTTTTTGGGGSSSSSSGGGGLLLLLLLLGGGGSSSSSSLLLLLLLLLLLLLLLLLLLLLLLLEEEEEEEEERRRRRRRRRRRLLLLLLLLSSSSSSVVVVVVVDDDDDDDDYYYYYYYYYYYYGGGGKKKKKKKKKKKKKKKKKKSSSSSSKKKKKKKKKLLLLLLLLGGGGFFFFFFFFFFFTTTTTTTIIIIIIIIYYYYYYYYYYYYPPPPPPPSSSSSSPPPPPPPQQQQQQQQQVVVVVVVSSSSSSTTTTTTTAAAAAVVVVVVVVVVVVVVEEEEEEEEEPPPPPPPYYYYYYYYYYYYNNNNNNNNSSSSSSVVVVVVVLLLLLLLLSSSSSSTTTTTTTHHHHHHHHHHSSSSSSLLLLLLLLLLLLLLLLEEEEEEEEEHHHHHHHHHHTTTTTTTDDDDDDDDVVVVVVVAAAAAVVVVVVVLLLLLLLLLLLLLLLLDDDDDDDDNNNNNNNNEEEEEEEEEAAAAAIIIIIIIIYYYYYYYYYYYYDDDDDDDDIIIIIIIICCCCCCRRRRRRRRRRRRRRRRRRRRRRSSSSSSLLLLLLLLDDDDDDDDIIIIIIIIEEEEEEEEERRRRRRRRRRRPPPPPPPTTTTTTTYYYYYYYYYYYYTTTTTTTNNNNNNNNLLLLLLLLNNNNNNNNRRRRRRRRRRRLLLLLLLLIIIIIIIISSSSSSQQQQQQQQQIIIIIIIIIIIIIIIISSSSSSSSSSSSLLLLLLLLTTTTTTTTTTTTTTSSSSSSLLLLLLLLRRRRRRRRRRRFFFFFFFFFFFDDDDDDDDGGGGAAAAAIIIIIIIINNNNNNNNVVVVVVVDDDDDDDDVVVVVVVTTTTTTTEEEEEEEEEFFFFFFFFFFFQQQQQQQQQTTTTTTTNNNNNNNNLLLLLLLLVVVVVVVPPPPPPPYYYYYYYYYYYYPPPPPPPRRRRRRRRRRRIIIIIIIIHHHHHHHHHHFFFFFFFFFFFMMMMMMMMLLLLLLLLSSSSSSSSSSSSYYYYYYYYYYYYAAAAAPPPPPPPVVVVVVVIIIIIIIISSSSSSAAAAAEEEEEEEEEKKKKKKKKKAAAAAYYYYYYYYYYYYHHHHHHHHHHEEEEEEEEEQQQQQQQQQLLLLLLLLSSSSSSVVVVVVVPPPPPPPEEEEEEEEEIIIIIIIITTTTTTTNNNNNNNNAAAAAVVVVVVVFFFFFFFFFFFEEEEEEEEEPPPPPPPSSSSSSSSSSSSMMMMMMMMMMMMMMMMAAAAAKKKKKKKKKCCCCCCDDDDDDDDPPPPPPPRRRRRRRRRRRHHHHHHHHHHGGGGKKKKKKKKKYYYYYYYYYYYYMMMMMMMMAAAAACCCCCCCCCCCCLLLLLLLLMMMMMMMMYYYYYYYYYYYYRRRRRRRRRRRGGGGDDDDDDDDVVVVVVVVVVVVVVPPPPPPPKKKKKKKKKDDDDDDDDVVVVVVVNNNNNNNNAAAAAAAAAAVVVVVVVAAAAATTTTTTTIIIIIIIIKKKKKKKKKTTTTTTTKKKKKKKKKRRRRRRRRRRRTTTTTTTVVVVVVVQQQQQQQQQFFFFFFFFFFFVVVVVVVDDDDDDDDWWWWWWWWWWWWWWCCCCCCPPPPPPPTTTTTTTGGGGFFFFFFFFFFFKKKKKKKKKCCCCCCGGGGIIIIIIIINNNNNNNNYYYYYYYYYYYYQQQQQQQQQPPPPPPPPPPPPPPSSSSSSVVVVVVVVVVVVVVPPPPPPPGGGGGGGGDDDDDDDDLLLLLLLLAAAAAKKKKKKKKKVVVVVVVQQQQQQQQQRRRRRRRRRRRAAAAAVVVVVVVCCCCCCMMMMMMMMIIIIIIIISSSSSSNNNNNNNNNNNNNNNNTTTTTTTAAAAAVVVVVVVAAAAAEEEEEEEEEVVVVVVVFFFFFFFFFFFSSSSSSRRRRRRRRRRRIIIIIIIIDDDDDDDDHHHHHHHHHHKKKKKKKKKFFFFFFFFFFFDDDDDDDDLLLLLLLLMMMMMMMMYYYYYYYYYYYYAAAAAKKKKKKKKKRRRRRRRRRRRAAAAAFFFFFFFFFFFVVVVVVVHHHHHHHHHHWWWWWWWWWWWWWWYYYYYYYYYYYYVVVVVVVGGGGEEEEEEEEEGGGGMMMMMMMMEEEEEEEEEEEEEEEEEEGGGGEEEEEEEEEFFFFFFFFFFFSSSSSSEEEEEEEEEAAAAARRRRRRRRRRREEEEEEEEEDDDDDDDDLLLLLLLLAAAAAAAAAALLLLLLLLEEEEEEEEEKKKKKKKKKDDDDDDDDYYYYYYYYYYYYEEEEEEEEEEEEEEEEEEVVVVVVVGGGGAAAAAEEEEEEEEEGGGGAAAAADDDDDDDDDDDDDDDDEEEEEEEEEGGGGDDDDDDDDEEEEEEEEEGGGGDDDDDDDDDDDDDDDDYYYYYYYYYYYYY

SEQ ID NO: 57 - protein, 3479 aa, Arabidopsis thaliana
MMMMMMMMRRRRRRRRRRREEEEEEEEECCCCCCIIIIIIIISSSSSSIIIIIIIIHHHHHHHHHHIIIIIIIIGGGGQQQQQQQQQAAAAAGGGGIIIIIIIIQQQQQQQQQVVVVVVVGGGGNNNNNNNNAAAAACCCCCCWWWWWWWWWWWWWWEEEEEEEEELLLLLLLLYYYYYYYYYYYYCCCCCCLLLLLLLLEEEEEEEEEHHHHHHHHHHGGGGIIIIIIIIQQQQQQQQQPPPPPPPDDDDDDDDGGGGQQQQQQQQQMMMMMMMMPPPPPPPGGGGDDDDDDDDKKKKKKKKKTTTTTTTVVVVVVVGGGGGGGGGGGGDDDDDDDDDDDDDDDDAAAAAFFFFFFFFFFFNNNNNNNNTTTTTTTFFFFFFFFFFFFFFFFFFFFFFSSSSSSEEEEEEEEETTTTTTTGGGGAAAAAGGGGKKKKKKKKKHHHHHHHHHHVVVVVVVPPPPPPPRRRRRRRRRRRAAAAAVVVVVVVFFFFFFFFFFFVVVVVVVDDDDDDDDLLLLLLLLEEEEEEEEEPPPPPPPTTTTTTTVVVVVVVIIIIIIIIDDDDDDDDEEEEEEEEEVVVVVVVRRRRRRRRRRRTTTTTTTGGGGTTTTTTTYYYYYYYYYYYYRRRRRRRRRRRQQQQQQQQQLLLLLLLLFFFFFFFFFFFHHHHHHHHHHPPPPPPPEEEEEEEEEQQQQQQQQQLLLLLLLLIIIIIIIISSSSSSGGGGKKKKKKKKKEEEEEEEEEDDDDDDDDAAAAAAAAAANNNNNNNNNNNNNNNNFFFFFFFFFFFAAAAARRRRRRRRRRRGGGGHHHHHHHHHHYYYYYYYYYYYYTTTTTTTIIIIIIIIGGGGKKKKKKKKKEEEEEEEEEIIIIIIIIVVVVVVVDDDDDDDDLLLLLLLLCCCCCCLLLLLLLLDDDDDDDDRRRRRRRRRRRIIIIIIIIRRRRRRRRRRRKKKKKKKKKLLLLLLLLAAAAADDDDDDDDNNNNNNNNCCCCCCTTTTTTTGGGGLLLLLLLLQQQQQQQQQGGGGFFFFFFFFFFFLLLLLLLLVVVVVVVFFFFFFFFFFFNNNNNNNNAAAAAVVVVVVVGGGGGGGGGGGGTTTTTTTGGGGSSSSSSGGGGLLLLLLLLGGGGSSSSSSLLLLLLLLLLLLLLLLLLLLLLLLEEEEEEEEERRRRRRRRRRRLLLLLLLLSSSSSSVVVVVVVDDDDDDDDYYYYYYYYYYYYGGGGKKKKKKKKKKKKKKKKKKSSSSSSKKKKKKKKKLLLLLLLLGGGGFFFFFFFFFFFTTTTTTTVVVVVVVYYYYYYYYYYYYPPPPPPPSSSSSSPPPPPPPQQQQQQQQQVVVVVVVSSSSSSTTTTTTTSSSSSSVVVVVVVVVVVVVVEEEEEEEEEPPPPPPPYYYYYYYYYYYYNNNNNNNNSSSSSSVVVVVVVLLLLLLLLSSSSSSTTTTTTTHHHHHHHHHHSSSSSSLLLLLLLLLLLLLLLLEEEEEEEEEHHHHHHHHHHTTTTTTTDDDDDDDDVVVVVVVSSSSSSIIIIIIIILLLLLLLLLLLLLLLLDDDDDDDDNNNNNNNNEEEEEEEEEAAAAAIIIIIIIIYYYYYYYYYYYYDDDDDDDDIIIIIIIICCCCCCRRRRRRRRRRRRRRRRRRRRRRSSSSSSLLLLLLLLNNNNNNNNIIIIIIIIEEEEEEEEERRRRRRRRRRRPPPPPPPTTTTTTTYYYYYYYYYYYYTTTTTTTNNNNNNNNLLLLLLLLNNNNNNNNRRRRRRRRRRRLLLLLLLLVVVVVVVSSSSSSQQQQQQQQQVVVVVVVIIIIIIIISSSSSSSSSSSSLLLLLLLLTTTTTTTAAAAASSSSSSLLLLLLLLRRRRRRRRRRRFFFFFFFFFFFDDDDDDDDGGGGAAAAALLLLLLLLNNNNNNNNVVVVVVVDDDDDDDDVVVVVVVTTTTTTTEEEEEEEEEFFFFFFFFFFFQQQQQQQQQTTTTTTTNNNNNNNNLLLLLLLLVVVVVVVPPPPPPPYYYYYYYYYYYYPPPPPPPRRRRRRRRRRRIIIIIIIIHHHHHHHHHHFFFFFFFFFFFMMMMMMMMLLLLLLLLSSSSSSSSSSSSYYYYYYYYYYYYAAAAAPPPPPPPVVVVVVVIIIIIIIISSSSSSAAAAAEEEEEEEEEKKKKKKKKKAAAAAFFFFFFFFFFFHHHHHHHHHHEEEEEEEEEQQQQQQQQQLLLLLLLLSSSSSSVVVVVVVAAAAAEEEEEEEEEIIIIIIIITTTTTTTNNNNNNNNSSSSSSAAAAAFFFFFFFFFFFEEEEEEEEEPPPPPPPAAAAASSSSSSMMMMMMMMMMMMMMMMAAAAAKKKKKKKKKCCCCCCDDDDDDDDPPPPPPPRRRRRRRRRRRHHHHHHHHHHGGGGKKKKKKKKKYYYYYYYYYYYYMMMMMMMMAAAAACCCCCCCCCCCCLLLLLLLLMMMMMMMMYYYYYYYYYYYYRRRRRRRRRRRGGGGDDDDDDDDVVVVVVVVVVVVVVPPPPPPPKKKKKKKKKDDDDDDDDVVVVVVVNNNNNNNNAAAAAAAAAAVVVVVVVGGGGTTTTTTTIIIIIIIIKKKKKKKKKTTTTTTTKKKKKKKKKRRRRRRRRRRRTTTTTTTIIIIIIIIQQQQQQQQQFFFFFFFFFFFVVVVVVVDDDDDDDDWWWWWWWWWWWWWWCCCCCCPPPPPPPTTTTTTTGGGGFFFFFFFFFFFKKKKKKKKKCCCCCCGGGGIIIIIIIINNNNNNNNYYYYYYYYYYYYQQQQQQQQQPPPPPPPPPPPPPPTTTTTTTVVVVVVVVVVVVVVPPPPPPPGGGGGGGGDDDDDDDDLLLLLLLLAAAAAKKKKKKKKKVVVVVVVQQQQQQQQQRRRRRRRRRRRAAAAAVVVVVVVCCCCCCMMMMMMMMIIIIIIIISSSSSSNNNNNNNNSSSSSSTTTTTTTSSSSSSVVVVVVVAAAAAEEEEEEEEEVVVVVVVFFFFFFFFFFFSSSSSSRRRRRRRRRRRIIIIIIIIDDDDDDDDHHHHHHHHHHKKKKKKKKKFFFFFFFFFFFDDDDDDDDLLLLLLLLMMMMMMMMYYYYYYYYYYYYAAAAAKKKKKKKKKRRRRRRRRRRRAAAAAFFFFFFFFFFFVVVVVVVHHHHHHHHHHWWWWWWWWWWWWWWYYYYYYYYYYYYVVVVVVVGGGGEEEEEEEEEGGGGMMMMMMMMEEEEEEEEEEEEEEEEEEGGGGEEEEEEEEEFFFFFFFFFFFSSSSSSEEEEEEEEEAAAAARRRRRRRRRRREEEEEEEEEDDDDDDDDLLLLLLLLAAAAAAAAAALLLLLLLLEEEEEEEEEKKKKKKKKKDDDDDDDDYYYYYYYYYYYYEEEEEEEEEEEEEEEEEEVVVVVVVGGGGAAAAAEEEEEEEEEGGGGGGGGDDDDDDDDDDDDDDDDEEEEEEEEEDDDDDDDDDDDDDDDDEEEEEEEEEGGGGEEEEEEEEEEEEEEEEEEYYYYYYYYYYYYY

SEQ ID NO: 58 - protein, 3507 aa, Homo sapiens
MMMMMMMMRRRRRRRRRRREEEEEEEEECCCCCCIIIIIIIISSSSSSIIIIIIIIHHHHHHHHHHVVVVVVVGGGGQQQQQQQQQAAAAAGGGGVVVVVVVQQQQQQQQQIIIIIIIIGGGGNNNNNNNNAAAAACCCCCCWWWWWWWWWWWWWWEEEEEEEEELLLLLLLLYYYYYYYYYYYYCCCCCCLLLLLLLLEEEEEEEEEHHHHHHHHHHGGGGIIIIIIIIQQQQQQQQQPPPPPPPDDDDDDDDGGGGQQQQQQQQQMMMMMMMMPPPPPPPSSSSSSDDDDDDDDKKKKKKKKKTTTTTTTIIIIIIIIGGGGGGGGGGGGDDDDDDDDDDDDDDDDSSSSSSFFFFFFFFFFFNNNNNNNNTTTTTTTFFFFFFFFFFFFFFFFFFFFFFSSSSSSEEEEEEEEETTTTTTTGGGGAAAAAGGGGKKKKKKKKKHHHHHHHHHHVVVVVVVPPPPPPPRRRRRRRRRRRAAAAAVVVVVVVFFFFFFFFFFFVVVVVVVDDDDDDDDLLLLLLLLEEEEEEEEEPPPPPPPTTTTTTTVVVVVVVIIIIIIIIDDDDDDDDEEEEEEEEEVVVVVVVRRRRRRRRRRRTTTTTTTGGGGTTTTTTTYYYYYYYYYYYYRRRRRRRRRRRQQQQQQQQQLLLLLLLLFFFFFFFFFFFHHHHHHHHHHPPPPPPPEEEEEEEEEQQQQQQQQQLLLLLLLLIIIIIIIITTTTTTTGGGGKKKKKKKKKEEEEEEEEEDDDDDDDDAAAAAAAAAANNNNNNNNNNNNNNNNYYYYYYYYYYYYAAAAARRRRRRRRRRRGGGGHHHHHHHHHHYYYYYYYYYYYYTTTTTTTIIIIIIIIGGGGKKKKKKKKKEEEEEEEEEIIIIIIIIIIIIIIIIDDDDDDDDLLLLLLLLVVVVVVVLLLLLLLLDDDDDDDDRRRRRRRRRRRIIIIIIIIRRRRRRRRRRRKKKKKKKKKLLLLLLLLAAAAADDDDDDDDQQQQQQQQQCCCCCCTTTTTTTGGGGLLLLLLLLQQQQQQQQQGGGGFFFFFFFFFFFLLLLLLLLVVVVVVVFFFFFFFFFFFHHHHHHHHHHSSSSSSFFFFFFFFFFFGGGGGGGGGGGGTTTTTTTGGGGSSSSSSGGGGFFFFFFFFFFFTTTTTTTSSSSSSLLLLLLLLLLLLLLLLMMMMMMMMEEEEEEEEERRRRRRRRRRRLLLLLLLLSSSSSSVVVVVVVDDDDDDDDYYYYYYYYYYYYGGGGKKKKKKKKKKKKKKKKKKSSSSSSKKKKKKKKKLLLLLLLLEEEEEEEEEFFFFFFFFFFFSSSSSSIIIIIIIIYYYYYYYYYYYYPPPPPPPAAAAAPPPPPPPQQQQQQQQQVVVVVVVSSSSSSTTTTTTTAAAAAVVVVVVVVVVVVVVEEEEEEEEEPPPPPPPYYYYYYYYYYYYNNNNNNNNSSSSSSIIIIIIIILLLLLLLLTTTTTTTTTTTTTTHHHHHHHHHHTTTTTTTTTTTTTTLLLLLLLLEEEEEEEEEHHHHHHHHHHSSSSSSDDDDDDDDCCCCCCAAAAAFFFFFFFFFFFMMMMMMMMVVVVVVVDDDDDDDDNNNNNNNNEEEEEEEEEAAAAAIIIIIIIIYYYYYYYYYYYYDDDDDDDDIIIIIIIICCCCCCRRRRRRRRRRRRRRRRRRRRRRNNNNNNNNLLLLLLLLDDDDDDDDIIIIIIIIEEEEEEEEERRRRRRRRRRRPPPPPPPTTTTTTTYYYYYYYYYYYYTTTTTTTNNNNNNNNLLLLLLLLNNNNNNNNRRRRRRRRRRRLLLLLLLLIIIIIIIISSSSSSQQQQQQQQQIIIIIIIIVVVVVVVSSSSSSSSSSSSIIIIIIIITTTTTTTAAAAASSSSSSLLLLLLLLRRRRRRRRRRRFFFFFFFFFFFDDDDDDDDGGGGAAAAALLLLLLLLNNNNNNNNVVVVVVVDDDDDDDDLLLLLLLLTTTTTTTEEEEEEEEEFFFFFFFFFFFQQQQQQQQQTTTTTTTNNNNNNNNLLLLLLLLVVVVVVVPPPPPPPYYYYYYYYYYYYPPPPPPPRRRRRRRRRRRIIIIIIIIHHHHHHHHHHFFFFFFFFFFFPPPPPPPLLLLLLLLAAAAATTTTTTTYYYYYYYYYYYYAAAAAPPPPPPPVVVVVVVIIIIIIIISSSSSSAAAAAEEEEEEEEEKKKKKKKKKAAAAAYYYYYYYYYYYYHHHHHHHHHHEEEEEEEEEQQQQQQQQQLLLLLLLLTTTTTTTVVVVVVVAAAAAEEEEEEEEEIIIIIIIITTTTTTTNNNNNNNNAAAAACCCCCCFFFFFFFFFFFEEEEEEEEEPPPPPPPAAAAANNNNNNNNQQQQQQQQQMMMMMMMMVVVVVVVKKKKKKKKKCCCCCCDDDDDDDDPPPPPPPRRRRRRRRRRRHHHHHHHHHHGGGGKKKKKKKKKYYYYYYYYYYYYMMMMMMMMAAAAACCCCCCCCCCCCLLLLLLLLLLLLLLLLYYYYYYYYYYYYRRRRRRRRRRRGGGGDDDDDDDDVVVVVVVVVVVVVVPPPPPPPKKKKKKKKKDDDDDDDDVVVVVVVNNNNNNNNAAAAAAAAAAIIIIIIIIAAAAATTTTTTTIIIIIIIIKKKKKKKKKTTTTTTTKKKKKKKKKRRRRRRRRRRRTTTTTTTIIIIIIIIQQQQQQQQQFFFFFFFFFFFVVVVVVVDDDDDDDDWWWWWWWWWWWWWWCCCCCCPPPPPPPTTTTTTTGGGGFFFFFFFFFFFKKKKKKKKKVVVVVVVGGGGIIIIIIIINNNNNNNNYYYYYYYYYYYYQQQQQQQQQPPPPPPPPPPPPPPTTTTTTTVVVVVVVVVVVVVVPPPPPPPGGGGGGGGDDDDDDDDLLLLLLLLAAAAAKKKKKKKKKVVVVVVVQQQQQQQQQRRRRRRRRRRRAAAAAVVVVVVVCCCCCCMMMMMMMMLLLLLLLLSSSSSSNNNNNNNNTTTTTTTTTTTTTTAAAAAVVVVVVVAAAAAEEEEEEEEEAAAAAWWWWWWWWWWWWWWAAAAARRRRRRRRRRRLLLLLLLLDDDDDDDDHHHHHHHHHHKKKKKKKKKFFFFFFFFFFFDDDDDDDDLLLLLLLLMMMMMMMMYYYYYYYYYYYYAAAAAKKKKKKKKKRRRRRRRRRRRAAAAAFFFFFFFFFFFVVVVVVVHHHHHHHHHHWWWWWWWWWWWWWWYYYYYYYYYYYYVVVVVVVGGGGEEEEEEEEEGGGGMMMMMMMMEEEEEEEEEEEEEEEEEEGGGGEEEEEEEEEFFFFFFFFFFFSSSSSSEEEEEEEEEAAAAARRRRRRRRRRREEEEEEEEEDDDDDDDDMMMMMMMMAAAAAAAAAALLLLLLLLEEEEEEEEEKKKKKKKKKDDDDDDDDYYYYYYYYYYYYEEEEEEEEEEEEEEEEEEVVVVVVVGGGGAAAAADDDDDDDDSSSSSSAAAAADDDDDDDDGGGGEEEEEEEEEDDDDDDDDEEEEEEEEEGGGGEEEEEEEEEEEEEEEEEEYYYYYYYYYYYYY

SEQ ID NO: 59 - protein, 3485 aa, Zea mays
MMMMMMMMRRRRRRRRRRREEEEEEEEEIIIIIIIIIIIIIIIISSSSSSIIIIIIIIHHHHHHHHHHIIIIIIIIGGGGQQQQQQQQQAAAAAGGGGIIIIIIIIQQQQQQQQQVVVVVVVGGGGNNNNNNNNAAAAACCCCCCWWWWWWWWWWWWWWEEEEEEEEELLLLLLLLYYYYYYYYYYYYCCCCCCLLLLLLLLEEEEEEEEEHHHHHHHHHHGGGGIIIIIIIIEEEEEEEEEPPPPPPPDDDDDDDDGGGGTTTTTTTMMMMMMMMPPPPPPPSSSSSSDDDDDDDDTTTTTTTSSSSSSVVVVVVVGGGGVVVVVVVAAAAAHHHHHHHHHHDDDDDDDDAAAAAFFFFFFFFFFFNNNNNNNNTTTTTTTFFFFFFFFFFFFFFFFFFFFFFSSSSSSEEEEEEEEETTTTTTTGGGGSSSSSSGGGGKKKKKKKKKHHHHHHHHHHVVVVVVVPPPPPPPRRRRRRRRRRRAAAAAIIIIIIIIFFFFFFFFFFFVVVVVVVDDDDDDDDLLLLLLLLEEEEEEEEEPPPPPPPTTTTTTTVVVVVVVIIIIIIIIDDDDDDDDEEEEEEEEEVVVVVVVRRRRRRRRRRRTTTTTTTGGGGSSSSSSYYYYYYYYYYYYRRRRRRRRRRRQQQQQQQQQLLLLLLLLFFFFFFFFFFFHHHHHHHHHHPPPPPPPEEEEEEEEEQQQQQQQQQLLLLLLLLIIIIIIIISSSSSSGGGGKKKKKKKKKEEEEEEEEEDDDDDDDDAAAAAAAAAANNNNNNNNNNNNNNNNFFFFFFFFFFFAAAAARRRRRRRRRRRGGGGHHHHHHHHHHYYYYYYYYYYYYTTTTTTTVVVVVVVGGGGKKKKKKKKKEEEEEEEEEIIIIIIIIVVVVVVVDDDDDDDDLLLLLLLLCCCCCCLLLLLLLLDDDDDDDDRRRRRRRRRRRVVVVVVVRRRRRRRRRRRKKKKKKKKKLLLLLLLLAAAAADDDDDDDDNNNNNNNNCCCCCCTTTTTTTGGGGLLLLLLLLQQQQQQQQQGGGGFFFFFFFFFFFLLLLLLLLVVVVVVVFFFFFFFFFFFNNNNNNNNAAAAAVVVVVVVGGGGGGGGGGGGTTTTTTTGGGGSSSSSSGGGGLLLLLLLLGGGGSSSSSSLLLLLLLLLLLLLLLLLLLLLLLLEEEEEEEEERRRRRRRRRRRLLLLLLLLSSSSSSVVVVVVVDDDDDDDDYYYYYYYYYYYYGGGGKKKKKKKKKKKKKKKKKKSSSSSSKKKKKKKKKLLLLLLLLGGGGFFFFFFFFFFFTTTTTTTIIIIIIIIYYYYYYYYYYYYPPPPPPPSSSSSSPPPPPPPQQQQQQQQQVVVVVVVSSSSSSTTTTTTTAAAAAVVVVVVVVVVVVVVEEEEEEEEEPPPPPPPYYYYYYYYYYYYNNNNNNNNSSSSSSVVVVVVVLLLLLLLLSSSSSSTTTTTTTHHHHHHHHHHSSSSSSLLLLLLLLLLLLLLLLEEEEEEEEEHHHHHHHHHHTTTTTTTDDDDDDDDVVVVVVVAAAAAVVVVVVVLLLLLLLLLLLLLLLLDDDDDDDDNNNNNNNNEEEEEEEEEAAAAAIIIIIIIIYYYYYYYYYYYYDDDDDDDDIIIIIIIICCCCCCRRRRRRRRRRRRRRRRRRRRRRSSSSSSLLLLLLLLDDDDDDDDIIIIIIIIEEEEEEEEERRRRRRRRRRRPPPPPPPTTTTTTTYYYYYYYYYYYYTTTTTTTNNNNNNNNLLLLLLLLNNNNNNNNRRRRRRRRRRRLLLLLLLLIIIIIIIISSSSSSQQQQQQQQQIIIIIIIIIIIIIIIISSSSSSSSSSSSLLLLLLLLTTTTTTTTTTTTTTSSSSSSLLLLLLLLRRRRRRRRRRRFFFFFFFFFFFDDDDDDDDGGGGAAAAAIIIIIIIINNNNNNNNVVVVVVVDDDDDDDDVVVVVVVTTTTTTTEEEEEEEEEFFFFFFFFFFFQQQQQQQQQTTTTTTTNNNNNNNNLLLLLLLLVVVVVVVPPPPPPPYYYYYYYYYYYYPPPPPPPRRRRRRRRRRRIIIIIIIIHHHHHHHHHHFFFFFFFFFFFMMMMMMMMLLLLLLLLSSSSSSSSSSSSYYYYYYYYYYYYAAAAAPPPPPPPVVVVVVVIIIIIIIISSSSSSAAAAAEEEEEEEEEKKKKKKKKKAAAAAYYYYYYYYYYYYHHHHHHHHHHEEEEEEEEEQQQQQQQQQLLLLLLLLSSSSSSVVVVVVVPPPPPPPEEEEEEEEEIIIIIIIITTTTTTTNNNNNNNNAAAAAVVVVVVVFFFFFFFFFFFEEEEEEEEEPPPPPPPSSSSSSSSSSSSMMMMMMMMMMMMMMMMAAAAAKKKKKKKKKCCCCCCDDDDDDDDPPPPPPPRRRRRRRRRRRHHHHHHHHHHGGGGKKKKKKKKKYYYYYYYYYYYYMMMMMMMMAAAAACCCCCCCCCCCCLLLLLLLLMMMMMMMMYYYYYYYYYYYYRRRRRRRRRRRGGGGDDDDDDDDVVVVVVVVVVVVVVPPPPPPPKKKKKKKKKDDDDDDDDVVVVVVVNNNNNNNNAAAAAAAAAAVVVVVVVAAAAATTTTTTTIIIIIIIIKKKKKKKKKTTTTTTTKKKKKKKKKRRRRRRRRRRRTTTTTTTVVVVVVVQQQQQQQQQFFFFFFFFFFFVVVVVVVDDDDDDDDWWWWWWWWWWWWWWCCCCCCPPPPPPPTTTTTTTGGGGFFFFFFFFFFFKKKKKKKKKCCCCCCGGGGIIIIIIIINNNNNNNNYYYYYYYYYYYYQQQQQQQQQPPPPPPPPPPPPPPSSSSSSVVVVVVVVVVVVVVPPPPPPPGGGGGGGGDDDDDDDDLLLLLLLLAAAAAKKKKKKKKKVVVVVVVQQQQQQQQQRRRRRRRRRRRAAAAAVVVVVVVCCCCCCMMMMMMMMIIIIIIIISSSSSSNNNNNNNNNNNNNNNNTTTTTTTAAAAAVVVVVVVAAAAAEEEEEEEEEVVVVVVVFFFFFFFFFFFSSSSSSRRRRRRRRRRRIIIIIIIIDDDDDDDDHHHHHHHHHHKKKKKKKKKFFFFFFFFFFFDDDDDDDDLLLLLLLLMMMMMMMMYYYYYYYYYYYYAAAAAKKKKKKKKKRRRRRRRRRRRAAAAAFFFFFFFFFFFVVVVVVVHHHHHHHHHHWWWWWWWWWWWWWWYYYYYYYYYYYYVVVVVVVGGGGEEEEEEEEEGGGGMMMMMMMMEEEEEEEEEEEEEEEEEEGGGGEEEEEEEEEFFFFFFFFFFFSSSSSSEEEEEEEEEAAAAARRRRRRRRRRREEEEEEEEEDDDDDDDDLLLLLLLLAAAAAAAAAALLLLLLLLEEEEEEEEEKKKKKKKKKDDDDDDDDYYYYYYYYYYYYEEEEEEEEEEEEEEEEEEVVVVVVVGGGGAAAAAEEEEEEEEEGGGGAAAAADDDDDDDDDDDDDDDDEEEEEEEEEGGGGDDDDDDDDEEEEEEEEEGGGGDDDDDDDDDDDDDDDDYYYYYYYYYYYYY

SEQ ID NO: 60 - protein, 3508 aa, Mus musculus
MMMMMMMMRRRRRRRRRRREEEEEEEEECCCCCCIIIIIIIISSSSSSIIIIIIIIHHHHHHHHHHVVVVVVVGGGGQQQQQQQQQAAAAAGGGGVVVVVVVQQQQQQQQQIIIIIIIIGGGGNNNNNNNNAAAAACCCCCCWWWWWWWWWWWWWWEEEEEEEEELLLLLLLLYYYYYYYYYYYYCCCCCCLLLLLLLLEEEEEEEEEHHHHHHHHHHGGGGIIIIIIIIQQQQQQQQQPPPPPPPDDDDDDDDGGGGQQQQQQQQQMMMMMMMMPPPPPPPSSSSSSDDDDDDDDKKKKKKKKKTTTTTTTIIIIIIIIGGGGGGGGGGGGDDDDDDDDDDDDDDDDSSSSSSFFFFFFFFFFFNNNNNNNNTTTTTTTFFFFFFFFFFFFFFFFFFFFFFSSSSSSEEEEEEEEETTTTTTTGGGGAAAAAGGGGKKKKKKKKKHHHHHHHHHHVVVVVVVPPPPPPPRRRRRRRRRRRAAAAAVVVVVVVFFFFFFFFFFFVVVVVVVDDDDDDDDLLLLLLLLEEEEEEEEEPPPPPPPTTTTTTTVVVVVVVIIIIIIIIDDDDDDDDEEEEEEEEEVVVVVVVRRRRRRRRRRRTTTTTTTGGGGTTTTTTTYYYYYYYYYYYYRRRRRRRRRRRQQQQQQQQQLLLLLLLLFFFFFFFFFFFHHHHHHHHHHPPPPPPPEEEEEEEEEQQQQQQQQQLLLLLLLLIIIIIIIITTTTTTTGGGGKKKKKKKKKEEEEEEEEEDDDDDDDDAAAAAAAAAANNNNNNNNNNNNNNNNYYYYYYYYYYYYAAAAARRRRRRRRRRRGGGGHHHHHHHHHHYYYYYYYYYYYYTTTTTTTIIIIIIIIGGGGKKKKKKKKKEEEEEEEEEIIIIIIIIIIIIIIIIDDDDDDDDLLLLLLLLVVVVVVVLLLLLLLLDDDDDDDDRRRRRRRRRRRIIIIIIIIRRRRRRRRRRRKKKKKKKKKLLLLLLLLAAAAADDDDDDDDQQQQQQQQQCCCCCCTTTTTTTGGGGLLLLLLLLQQQQQQQQQGGGGFFFFFFFFFFFLLLLLLLLVVVVVVVFFFFFFFFFFFHHHHHHHHHHSSSSSSFFFFFFFFFFFGGGGGGGGGGGGTTTTTTTGGGGSSSSSSGGGGFFFFFFFFFFFTTTTTTTSSSSSSLLLLLLLLLLLLLLLLMMMMMMMMEEEEEEEEERRRRRRRRRRRLLLLLLLLSSSSSSVVVVVVVDDDDDDDDYYYYYYYYYYYYGGGGKKKKKKKKKKKKKKKKKKSSSSSSKKKKKKKKKLLLLLLLLEEEEEEEEEFFFFFFFFFFFSSSSSSIIIIIIIIYYYYYYYYYYYYPPPPPPPAAAAAPPPPPPPQQQQQQQQQVVVVVVVSSSSSSTTTTTTTAAAAAVVVVVVVVVVVVVVEEEEEEEEEPPPPPPPYYYYYYYYYYYYNNNNNNNNSSSSSSIIIIIIIILLLLLLLLTTTTTTTTTTTTTTHHHHHHHHHHTTTTTTTTTTTTTTLLLLLLLLEEEEEEEEEHHHHHHHHHHSSSSSSDDDDDDDDCCCCCCAAAAAFFFFFFFFFFFMMMMMMMMVVVVVVVDDDDDDDDNNNNNNNNEEEEEEEEEAAAAAIIIIIIIIYYYYYYYYYYYYDDDDDDDDIIIIIIIICCCCCCRRRRRRRRRRRRRRRRRRRRRRNNNNNNNNLLLLLLLLDDDDDDDDIIIIIIIIEEEEEEEEERRRRRRRRRRRPPPPPPPTTTTTTTYYYYYYYYYYYYTTTTTTTNNNNNNNNLLLLLLLLNNNNNNNNRRRRRRRRRRRLLLLLLLLIIIIIIIISSSSSSQQQQQQQQQIIIIIIIIVVVVVVVSSSSSSSSSSSSIIIIIIIITTTTTTTAAAAASSSSSSLLLLLLLLRRRRRRRRRRRFFFFFFFFFFFDDDDDDDDGGGGAAAAALLLLLLLLNNNNNNNNVVVVVVVDDDDDDDDLLLLLLLLTTTTTTTEEEEEEEEEFFFFFFFFFFFQQQQQQQQQTTTTTTTNNNNNNNNLLLLLLLLVVVVVVVPPPPPPPYYYYYYYYYYYYPPPPPPPRRRRRRRRRRRIIIIIIIIHHHHHHHHHHFFFFFFFFFFFPPPPPPPLLLLLLLLAAAAATTTTTTTYYYYYYYYYYYYAAAAAPPPPPPPVVVVVVVIIIIIIIISSSSSSAAAAAEEEEEEEEEKKKKKKKKKAAAAAYYYYYYYYYYYYHHHHHHHHHHEEEEEEEEEQQQQQQQQQLLLLLLLLTTTTTTTVVVVVVVAAAAAEEEEEEEEEIIIIIIIITTTTTTTNNNNNNNNAAAAACCCCCCFFFFFFFFFFFEEEEEEEEEPPPPPPPAAAAANNNNNNNNQQQQQQQQQMMMMMMMMVVVVVVVKKKKKKKKKCCCCCCDDDDDDDDPPPPPPPRRRRRRRRRRRHHHHHHHHHHGGGGKKKKKKKKKYYYYYYYYYYYYMMMMMMMMAAAAACCCCCCCCCCCCLLLLLLLLLLLLLLLLYYYYYYYYYYYYRRRRRRRRRRRGGGGDDDDDDDDVVVVVVVVVVVVVVPPPPPPPKKKKKKKKKDDDDDDDDVVVVVVVNNNNNNNNAAAAAAAAAAIIIIIIIIAAAAATTTTTTTIIIIIIIIKKKKKKKKKTTTTTTTKKKKKKKKKRRRRRRRRRRRTTTTTTTIIIIIIIIQQQQQQQQQFFFFFFFFFFFVVVVVVVDDDDDDDDWWWWWWWWWWWWWWCCCCCCPPPPPPPTTTTTTTGGGGFFFFFFFFFFFKKKKKKKKKVVVVVVVGGGGIIIIIIIINNNNNNNNYYYYYYYYYYYYQQQQQQQQQPPPPPPPPPPPPPPTTTTTTTVVVVVVVVVVVVVVPPPPPPPGGGGGGGGDDDDDDDDLLLLLLLLAAAAAKKKKKKKKKVVVVVVVQQQQQQQQQRRRRRRRRRRRAAAAAVVVVVVVCCCCCCMMMMMMMMLLLLLLLLSSSSSSNNNNNNNNTTTTTTTTTTTTTTAAAAAIIIIIIIIAAAAAEEEEEEEEEAAAAAWWWWWWWWWWWWWWAAAAARRRRRRRRRRRLLLLLLLLDDDDDDDDHHHHHHHHHHKKKKKKKKKFFFFFFFFFFFDDDDDDDDLLLLLLLLMMMMMMMMYYYYYYYYYYYYAAAAAKKKKKKKKKRRRRRRRRRRRAAAAAFFFFFFFFFFFVVVVVVVHHHHHHHHHHWWWWWWWWWWWWWWYYYYYYYYYYYYVVVVVVVGGGGEEEEEEEEEGGGGMMMMMMMMEEEEEEEEEEEEEEEEEEGGGGEEEEEEEEEFFFFFFFFFFFSSSSSSEEEEEEEEEAAAAARRRRRRRRRRREEEEEEEEEDDDDDDDDMMMMMMMMAAAAAAAAAALLLLLLLLEEEEEEEEEKKKKKKKKKDDDDDDDDYYYYYYYYYYYYEEEEEEEEEEEEEEEEEEVVVVVVVGGGGAAAAADDDDDDDDSSSSSSAAAAAEEEEEEEEEGGGGDDDDDDDDDDDDDDDDEEEEEEEEEGGGGEEEEEEEEEEEEEEEEEEYYYYYYYYYYYYY

SEQ ID NO: 61 - protein, 3524 aa, Caenorhabditis elegans
MMMMMMMMRRRRRRRRRRREEEEEEEEECCCCCCVVVVVVVSSSSSSIIIIIIIIHHHHHHHHHHIIIIIIIIGGGGQQQQQQQQQAAAAAGGGGAAAAAQQQQQQQQQIIIIIIIIGGGGNNNNNNNNAAAAACCCCCCWWWWWWWWWWWWWWEEEEEEEEELLLLLLLLYYYYYYYYYYYYCCCCCCIIIIIIIIEEEEEEEEEHHHHHHHHHHGGGGLLLLLLLLDDDDDDDDEEEEEEEEEAAAAAGGGGFFFFFFFFFFFLLLLLLLLKKKKKKKKKEEEEEEEEEEEEEEEEEEEEEEEEEEEKKKKKKKKKNNNNNNNNKKKKKKKKKKKKKKKKKKQQQQQQQQQQQQQQQQQQSSSSSSLLLLLLLLQQQQQQQQQAAAAAFFFFFFFFFFFFFFFFFFFFFFSSSSSSEEEEEEEEESSSSSSMMMMMMMMNNNNNNNNGGGGKKKKKKKKKHHHHHHHHHHVVVVVVVPPPPPPPRRRRRRRRRRRAAAAAIIIIIIIIYYYYYYYYYYYYVVVVVVVDDDDDDDDLLLLLLLLEEEEEEEEEPPPPPPPTTTTTTTVVVVVVVLLLLLLLLDDDDDDDDEEEEEEEEEIIIIIIIIRRRRRRRRRRRNNNNNNNNGGGGVVVVVVVYYYYYYYYYYYYGGGGNNNNNNNNLLLLLLLLFFFFFFFFFFFHHHHHHHHHHPPPPPPPDDDDDDDDQQQQQQQQQIIIIIIIIIIIIIIIINNNNNNNNGGGGKKKKKKKKKEEEEEEEEEDDDDDDDDAAAAAAAAAANNNNNNNNNNNNNNNNYYYYYYYYYYYYAAAAARRRRRRRRRRRGGGGHHHHHHHHHHYYYYYYYYYYYYTTTTTTTIIIIIIIIGGGGKKKKKKKKKEEEEEEEEELLLLLLLLIIIIIIIIDDDDDDDDVVVVVVVVVVVVVVLLLLLLLLDDDDDDDDRRRRRRRRRRRIIIIIIIIRRRRRRRRRRRKKKKKKKKKQQQQQQQQQTTTTTTTEEEEEEEEENNNNNNNNCCCCCCEEEEEEEEEGGGGLLLLLLLLQQQQQQQQQGGGGFFFFFFFFFFFLLLLLLLLVVVVVVVFFFFFFFFFFFHHHHHHHHHHSSSSSSFFFFFFFFFFFGGGGGGGGGGGGTTTTTTTGGGGSSSSSSGGGGFFFFFFFFFFFSSSSSSSSSSSSLLLLLLLLLLLLLLLLMMMMMMMMEEEEEEEEERRRRRRRRRRRLLLLLLLLSSSSSSVVVVVVVEEEEEEEEEFFFFFFFFFFFGGGGKKKKKKKKKKKKKKKKKKSSSSSSKKKKKKKKKLLLLLLLLEEEEEEEEEFFFFFFFFFFFSSSSSSVVVVVVVYYYYYYYYYYYYPPPPPPPAAAAAPPPPPPPQQQQQQQQQVVVVVVVSSSSSSTTTTTTTSSSSSSVVVVVVVVVVVVVVEEEEEEEEEPPPPPPPYYYYYYYYYYYYNNNNNNNNSSSSSSIIIIIIIILLLLLLLLTTTTTTTTTTTTTTHHHHHHHHHHTTTTTTTTTTTTTTLLLLLLLLEEEEEEEEELLLLLLLLSSSSSSDDDDDDDDCCCCCCSSSSSSFFFFFFFFFFFMMMMMMMMVVVVVVVDDDDDDDDNNNNNNNNEEEEEEEEEAAAAAIIIIIIIIYYYYYYYYYYYYDDDDDDDDLLLLLLLLCCCCCCRRRRRRRRRRRQQQQQQQQQKKKKKKKKKLLLLLLLLHHHHHHHHHHVVVVVVVEEEEEEEEERRRRRRRRRRRPPPPPPPSSSSSSYYYYYYYYYYYYSSSSSSNNNNNNNNLLLLLLLLNNNNNNNNRRRRRRRRRRRLLLLLLLLIIIIIIIIAAAAAQQQQQQQQQVVVVVVVVVVVVVVSSSSSSSSSSSSIIIIIIIITTTTTTTAAAAASSSSSSLLLLLLLLRRRRRRRRRRRFFFFFFFFFFFDDDDDDDDGGGGAAAAALLLLLLLLNNNNNNNNVVVVVVVDDDDDDDDLLLLLLLLNNNNNNNNEEEEEEEEEFFFFFFFFFFFQQQQQQQQQTTTTTTTNNNNNNNNLLLLLLLLVVVVVVVPPPPPPPYYYYYYYYYYYYPPPPPPPRRRRRRRRRRRIIIIIIIIHHHHHHHHHHFFFFFFFFFFFPPPPPPPLLLLLLLLAAAAATTTTTTTYYYYYYYYYYYYAAAAAPPPPPPPVVVVVVVIIIIIIIISSSSSSAAAAADDDDDDDDRRRRRRRRRRRAAAAAHHHHHHHHHHHHHHHHHHHHEEEEEEEEEPPPPPPPLLLLLLLLSSSSSSVVVVVVVQQQQQQQQQDDDDDDDDIIIIIIIITTTTTTTHHHHHHHHHHMMMMMMMMCCCCCCFFFFFFFFFFFEEEEEEEEEKKKKKKKKKAAAAANNNNNNNNQQQQQQQQQMMMMMMMMVVVVVVVKKKKKKKKKCCCCCCDDDDDDDDPPPPPPPSSSSSSAAAAAGGGGKKKKKKKKKYYYYYYYYYYYYMMMMMMMMAAAAAVVVVVVVCCCCCCLLLLLLLLLLLLLLLLYYYYYYYYYYYYRRRRRRRRRRRGGGGDDDDDDDDVVVVVVVVVVVVVVPPPPPPPKKKKKKKKKDDDDDDDDVVVVVVVNNNNNNNNAAAAAAAAAAIIIIIIIISSSSSSSSSSSSVVVVVVVKKKKKKKKKAAAAAKKKKKKKKKRRRRRRRRRRRGGGGIIIIIIIINNNNNNNNFFFFFFFFFFFVVVVVVVDDDDDDDDWWWWWWWWWWWWWWCCCCCCPPPPPPPTTTTTTTGGGGFFFFFFFFFFFKKKKKKKKKVVVVVVVGGGGIIIIIIIINNNNNNNNYYYYYYYYYYYYQQQQQQQQQAAAAAPPPPPPPIIIIIIIITTTTTTTVVVVVVVEEEEEEEEEGGGGGGGGDDDDDDDDLLLLLLLLAAAAAKKKKKKKKKVVVVVVVHHHHHHHHHHRRRRRRRRRRRAAAAAVVVVVVVCCCCCCMMMMMMMMLLLLLLLLSSSSSSNNNNNNNNTTTTTTTTTTTTTTAAAAAIIIIIIIIAAAAAEEEEEEEEEAAAAAWWWWWWWWWWWWWWAAAAARRRRRRRRRRRLLLLLLLLDDDDDDDDHHHHHHHHHHKKKKKKKKKFFFFFFFFFFFDDDDDDDDLLLLLLLLMMMMMMMMYYYYYYYYYYYYSSSSSSKKKKKKKKKRRRRRRRRRRRAAAAAFFFFFFFFFFFVVVVVVVHHHHHHHHHHWWWWWWWWWWWWWWFFFFFFFFFFFVVVVVVVGGGGEEEEEEEEEGGGGMMMMMMMMEEEEEEEEEEEEEEEEEEGGGGEEEEEEEEEFFFFFFFFFFFMMMMMMMMEEEEEEEEEAAAAARRRRRRRRRRRDDDDDDDDDDDDDDDDLLLLLLLLAAAAAAAAAALLLLLLLLEEEEEEEEEKKKKKKKKKDDDDDDDDYYYYYYYYYYYYAAAAAEEEEEEEEEVVVVVVVSSSSSSRRRRRRRRRRRDDDDDDDDTTTTTTTAAAAADDDDDDDDLLLLLLLLEEEEEEEEEEEEEEEEEEEEEEEEEEENNNNNNNNDDDDDDDDEEEEEEEEEFFFFFFFFFFFF

SEQ ID NO: 62 - protein, 2539 aa, Gallus gallus
VVVVVVVDDDDDDDDQQQQQQQQQCCCCCCTTTTTTTGGGGLLLLLLLLQQQQQQQQQGGGGFFFFFFFFFFFLLLLLLLLIIIIIIIIFFFFFFFFFFFHHHHHHHHHHSSSSSSFFFFFFFFFFFGGGGGGGGGGGGTTTTTTTGGGGSSSSSSGGGGFFFFFFFFFFFTTTTTTTSSSSSSLLLLLLLLLLLLLLLLMMMMMMMMEEEEEEEEERRRRRRRRRRRLLLLLLLLSSSSSSVVVVVVVDDDDDDDDYYYYYYYYYYYYGGGGKKKKKKKKKKKKKKKKKKSSSSSSKKKKKKKKKLLLLLLLLEEEEEEEEEFFFFFFFFFFFAAAAAIIIIIIIIYYYYYYYYYYYYPPPPPPPAAAAAPPPPPPPQQQQQQQQQVVVVVVVSSSSSSTTTTTTTAAAAAVVVVVVVVVVVVVVEEEEEEEEEPPPPPPPYYYYYYYYYYYYNNNNNNNNSSSSSSIIIIIIIILLLLLLLLTTTTTTTTTTTTTTHHHHHHHHHHTTTTTTTTTTTTTTLLLLLLLLEEEEEEEEEQQQQQQQQQSSSSSSDDDDDDDDCCCCCCAAAAAFFFFFFFFFFFMMMMMMMMVVVVVVVDDDDDDDDNNNNNNNNEEEEEEEEEAAAAAIIIIIIIIYYYYYYYYYYYYDDDDDDDDIIIIIIIICCCCCCRRRRRRRRRRRRRRRRRRRRRRNNNNNNNNLLLLLLLLDDDDDDDDIIIIIIIIEEEEEEEEERRRRRRRRRRRPPPPPPPTTTTTTTYYYYYYYYYYYYTTTTTTTNNNNNNNNLLLLLLLLNNNNNNNNRRRRRRRRRRRLLLLLLLLIIIIIIIIGGGGQQQQQQQQQIIIIIIIIVVVVVVVSSSSSSSSSSSSIIIIIIIITTTTTTTAAAAASSSSSSLLLLLLLLRRRRRRRRRRRFFFFFFFFFFFDDDDDDDDGGGGAAAAALLLLLLLLNNNNNNNNVVVVVVVDDDDDDDDLLLLLLLLTTTTTTTEEEEEEEEEFFFFFFFFFFFQQQQQQQQQTTTTTTTNNNNNNNNLLLLLLLLVVVVVVVPPPPPPPYYYYYYYYYYYYPPPPPPPRRRRRRRRRRRIIIIIIIIHHHHHHHHHHFFFFFFFFFFFPPPPPPPLLLLLLLLVVVVVVVTTTTTTTYYYYYYYYYYYYSSSSSSPPPPPPPIIIIIIIIIIIIIIIISSSSSSAAAAAEEEEEEEEEKKKKKKKKKAAAAAYYYYYYYYYYYYHHHHHHHHHHEEEEEEEEEQQQQQQQQQLLLLLLLLSSSSSSVVVVVVVSSSSSSEEEEEEEEEIIIIIIIITTTTTTTNNNNNNNNAAAAACCCCCCFFFFFFFFFFFEEEEEEEEEPPPPPPPSSSSSSNNNNNNNNQQQQQQQQQMMMMMMMMVVVVVVVKKKKKKKKKCCCCCCDDDDDDDDPPPPPPPRRRRRRRRRRRHHHHHHHHHHGGGGKKKKKKKKKYYYYYYYYYYYYMMMMMMMMAAAAACCCCCCCCCCCCMMMMMMMMLLLLLLLLYYYYYYYYYYYYRRRRRRRRRRRGGGGDDDDDDDDVVVVVVVVVVVVVVPPPPPPPKKKKKKKKKDDDDDDDDVVVVVVVNNNNNNNNAAAAAAAAAAIIIIIIIIAAAAAAAAAAIIIIIIIIKKKKKKKKKTTTTTTTKKKKKKKKKRRRRRRRRRRRTTTTTTTIIIIIIIIQQQQQQQQQFFFFFFFFFFFVVVVVVVDDDDDDDDWWWWWWWWWWWWWWCCCCCCPPPPPPPTTTTTTTGGGGFFFFFFFFFFFKKKKKKKKKVVVVVVVGGGGIIIIIIIINNNNNNNNYYYYYYYYYYYYQQQQQQQQQPPPPPPPPPPPPPPTTTTTTTVVVVVVVVVVVVVVPPPPPPPGGGGGGGGDDDDDDDDLLLLLLLLAAAAAKKKKKKKKKVVVVVVVQQQQQQQQQRRRRRRRRRRRAAAAAVVVVVVVCCCCCCMMMMMMMMLLLLLLLLSSSSSSNNNNNNNNTTTTTTTTTTTTTTAAAAAIIIIIIIIAAAAAEEEEEEEEEAAAAAWWWWWWWWWWWWWWAAAAARRRRRRRRRRRLLLLLLLLDDDDDDDDHHHHHHHHHHKKKKKKKKKFFFFFFFFFFFDDDDDDDDLLLLLLLLMMMMMMMMYYYYYYYYYYYYAAAAAKKKKKKKKKRRRRRRRRRRRAAAAAFFFFFFFFFFFVVVVVVVHHHHHHHHHHWWWWWWWWWWWWWWYYYYYYYYYYYYVVVVVVVGGGGEEEEEEEEEGGGGMMMMMMMMEEEEEEEEEEEEEEEEEEGGGGEEEEEEEEEFFFFFFFFFFFSSSSSSEEEEEEEEEAAAAARRRRRRRRRRREEEEEEEEEDDDDDDDDLLLLLLLLAAAAAAAAAALLLLLLLLEEEEEEEEEKKKKKKKKKDDDDDDDDYYYYYYYYYYYYEEEEEEEEEEEEEEEEEEVVVVVVVGGGGTTTTTTTDDDDDDDDSSSSSSMMMMMMMMDDDDDDDDGGGGEEEEEEEEEDDDDDDDDEEEEEEEEEGGGGEEEEEEEEEEEEEEEEEEYYYYYYYYYYYYY

SEQ ID NO: 63 - protein, 3521 aa, Homo sapiens
MMMMMMMMRRRRRRRRRRREEEEEEEEECCCCCCIIIIIIIISSSSSSVVVVVVVHHHHHHHHHHVVVVVVVGGGGQQQQQQQQQAAAAAGGGGVVVVVVVQQQQQQQQQIIIIIIIIGGGGNNNNNNNNAAAAACCCCCCWWWWWWWWWWWWWWEEEEEEEEELLLLLLLLFFFFFFFFFFFCCCCCCLLLLLLLLEEEEEEEEEHHHHHHHHHHGGGGIIIIIIIIQQQQQQQQQAAAAADDDDDDDDGGGGTTTTTTTFFFFFFFFFFFDDDDDDDDAAAAAQQQQQQQQQAAAAASSSSSSKKKKKKKKKIIIIIIIINNNNNNNNDDDDDDDDDDDDDDDDDDDDDDDDSSSSSSFFFFFFFFFFFTTTTTTTTTTTTTTFFFFFFFFFFFFFFFFFFFFFFSSSSSSEEEEEEEEETTTTTTTGGGGNNNNNNNNGGGGKKKKKKKKKHHHHHHHHHHVVVVVVVPPPPPPPRRRRRRRRRRRAAAAAVVVVVVVMMMMMMMMIIIIIIIIDDDDDDDDLLLLLLLLEEEEEEEEEPPPPPPPTTTTTTTVVVVVVVVVVVVVVDDDDDDDDEEEEEEEEEVVVVVVVRRRRRRRRRRRAAAAAGGGGTTTTTTTYYYYYYYYYYYYRRRRRRRRRRRQQQQQQQQQLLLLLLLLFFFFFFFFFFFHHHHHHHHHHPPPPPPPEEEEEEEEEQQQQQQQQQLLLLLLLLIIIIIIIITTTTTTTGGGGKKKKKKKKKEEEEEEEEEDDDDDDDDAAAAAAAAAANNNNNNNNNNNNNNNNYYYYYYYYYYYYAAAAARRRRRRRRRRRGGGGHHHHHHHHHHYYYYYYYYYYYYTTTTTTTVVVVVVVGGGGKKKKKKKKKEEEEEEEEESSSSSSIIIIIIIIDDDDDDDDLLLLLLLLVVVVVVVLLLLLLLLDDDDDDDDRRRRRRRRRRRIIIIIIIIRRRRRRRRRRRKKKKKKKKKLLLLLLLLTTTTTTTDDDDDDDDAAAAACCCCCCSSSSSSGGGGLLLLLLLLQQQQQQQQQGGGGFFFFFFFFFFFLLLLLLLLIIIIIIIIFFFFFFFFFFFHHHHHHHHHHSSSSSSFFFFFFFFFFFGGGGGGGGGGGGTTTTTTTGGGGSSSSSSGGGGFFFFFFFFFFFTTTTTTTSSSSSSLLLLLLLLLLLLLLLLMMMMMMMMEEEEEEEEERRRRRRRRRRRLLLLLLLLSSSSSSLLLLLLLLDDDDDDDDYYYYYYYYYYYYGGGGKKKKKKKKKKKKKKKKKKSSSSSSKKKKKKKKKLLLLLLLLEEEEEEEEEFFFFFFFFFFFAAAAAIIIIIIIIYYYYYYYYYYYYPPPPPPPAAAAAPPPPPPPQQQQQQQQQVVVVVVVSSSSSSTTTTTTTAAAAAVVVVVVVVVVVVVVEEEEEEEEEPPPPPPPYYYYYYYYYYYYNNNNNNNNSSSSSSIIIIIIIILLLLLLLLTTTTTTTTTTTTTTHHHHHHHHHHTTTTTTTTTTTTTTLLLLLLLLEEEEEEEEEHHHHHHHHHHSSSSSSDDDDDDDDCCCCCCAAAAAFFFFFFFFFFFMMMMMMMMVVVVVVVDDDDDDDDNNNNNNNNEEEEEEEEEAAAAAIIIIIIIIYYYYYYYYYYYYDDDDDDDDIIIIIIIICCCCCCRRRRRRRRRRRRRRRRRRRRRRNNNNNNNNLLLLLLLLDDDDDDDDIIIIIIIIEEEEEEEEERRRRRRRRRRRPPPPPPPTTTTTTTYYYYYYYYYYYYTTTTTTTNNNNNNNNLLLLLLLLNNNNNNNNRRRRRRRRRRRLLLLLLLLIIIIIIIISSSSSSQQQQQQQQQIIIIIIIIVVVVVVVSSSSSSSSSSSSIIIIIIIITTTTTTTAAAAASSSSSSLLLLLLLLRRRRRRRRRRRFFFFFFFFFFFDDDDDDDDGGGGAAAAALLLLLLLLNNNNNNNNVVVVVVVDDDDDDDDLLLLLLLLTTTTTTTEEEEEEEEEFFFFFFFFFFFQQQQQQQQQTTTTTTTNNNNNNNNLLLLLLLLVVVVVVVPPPPPPPYYYYYYYYYYYYPPPPPPPRRRRRRRRRRRIIIIIIIIHHHHHHHHHHFFFFFFFFFFFPPPPPPPLLLLLLLLVVVVVVVTTTTTTTYYYYYYYYYYYYAAAAAPPPPPPPIIIIIIIIIIIIIIIISSSSSSAAAAAEEEEEEEEEKKKKKKKKKAAAAAYYYYYYYYYYYYHHHHHHHHHHEEEEEEEEEQQQQQQQQQLLLLLLLLSSSSSSVVVVVVVAAAAAEEEEEEEEEIIIIIIIITTTTTTTSSSSSSSSSSSSCCCCCCFFFFFFFFFFFEEEEEEEEEPPPPPPPNNNNNNNNSSSSSSQQQQQQQQQMMMMMMMMVVVVVVVKKKKKKKKKCCCCCCDDDDDDDDPPPPPPPRRRRRRRRRRRHHHHHHHHHHGGGGKKKKKKKKKYYYYYYYYYYYYMMMMMMMMAAAAACCCCCCCCCCCCMMMMMMMMLLLLLLLLYYYYYYYYYYYYRRRRRRRRRRRGGGGDDDDDDDDVVVVVVVVVVVVVVPPPPPPPKKKKKKKKKDDDDDDDDVVVVVVVNNNNNNNNVVVVVVVAAAAAIIIIIIIIAAAAAAAAAAIIIIIIIIKKKKKKKKKTTTTTTTKKKKKKKKKRRRRRRRRRRRTTTTTTTIIIIIIIIQQQQQQQQQFFFFFFFFFFFVVVVVVVDDDDDDDDWWWWWWWWWWWWWWCCCCCCPPPPPPPTTTTTTTGGGGFFFFFFFFFFFKKKKKKKKKVVVVVVVGGGGIIIIIIIINNNNNNNNYYYYYYYYYYYYQQQQQQQQQPPPPPPPPPPPPPPTTTTTTTVVVVVVVVVVVVVVPPPPPPPGGGGGGGGDDDDDDDDLLLLLLLLAAAAAKKKKKKKKKVVVVVVVQQQQQQQQQRRRRRRRRRRRAAAAAVVVVVVVCCCCCCMMMMMMMMLLLLLLLLSSSSSSNNNNNNNNTTTTTTTTTTTTTTAAAAAIIIIIIIIAAAAAEEEEEEEEEAAAAAWWWWWWWWWWWWWWAAAAARRRRRRRRRRRLLLLLLLLDDDDDDDDHHHHHHHHHHKKKKKKKKKFFFFFFFFFFFDDDDDDDDLLLLLLLLMMMMMMMMYYYYYYYYYYYYAAAAAKKKKKKKKKRRRRRRRRRRRAAAAAFFFFFFFFFFFVVVVVVVHHHHHHHHHHWWWWWWWWWWWWWWYYYYYYYYYYYYVVVVVVVGGGGEEEEEEEEEGGGGMMMMMMMMEEEEEEEEEEEEEEEEEEGGGGEEEEEEEEEFFFFFFFFFFFSSSSSSEEEEEEEEEAAAAARRRRRRRRRRREEEEEEEEEDDDDDDDDLLLLLLLLAAAAAAAAAALLLLLLLLEEEEEEEEEKKKKKKKKKDDDDDDDDYYYYYYYYYYYYEEEEEEEEEEEEEEEEEEVVVVVVVGGGGTTTTTTTDDDDDDDDSSSSSSFFFFFFFFFFFEEEEEEEEEEEEEEEEEEEEEEEEEEENNNNNNNNEEEEEEEEEGGGGEEEEEEEEEEEEEEEEEEFFFFFFFFFFFF

SEQ ID NO: 64 - protein, 3518 aa, Mus musculus
MMMMMMMMRRRRRRRRRRREEEEEEEEECCCCCCIIIIIIIISSSSSSVVVVVVVHHHHHHHHHHVVVVVVVGGGGQQQQQQQQQAAAAAGGGGVVVVVVVQQQQQQQQQIIIIIIIIGGGGNNNNNNNNAAAAACCCCCCWWWWWWWWWWWWWWEEEEEEEEELLLLLLLLFFFFFFFFFFFCCCCCCLLLLLLLLEEEEEEEEEHHHHHHHHHHGGGGIIIIIIIIQQQQQQQQQAAAAADDDDDDDDGGGGTTTTTTTFFFFFFFFFFFGGGGTTTTTTTQQQQQQQQQAAAAASSSSSSKKKKKKKKKIIIIIIIINNNNNNNNDDDDDDDDDDDDDDDDDDDDDDDDSSSSSSFFFFFFFFFFFTTTTTTTTTTTTTTFFFFFFFFFFFFFFFFFFFFFFSSSSSSEEEEEEEEETTTTTTTGGGGNNNNNNNNGGGGKKKKKKKKKHHHHHHHHHHVVVVVVVPPPPPPPRRRRRRRRRRRAAAAAVVVVVVVMMMMMMMMVVVVVVVDDDDDDDDLLLLLLLLEEEEEEEEEPPPPPPPTTTTTTTVVVVVVVVVVVVVVDDDDDDDDEEEEEEEEEVVVVVVVRRRRRRRRRRRAAAAAGGGGTTTTTTTYYYYYYYYYYYYRRRRRRRRRRRQQQQQQQQQLLLLLLLLFFFFFFFFFFFHHHHHHHHHHPPPPPPPEEEEEEEEEQQQQQQQQQLLLLLLLLIIIIIIIITTTTTTTGGGGKKKKKKKKKEEEEEEEEEDDDDDDDDAAAAAAAAAANNNNNNNNNNNNNNNNYYYYYYYYYYYYAAAAARRRRRRRRRRRGGGGHHHHHHHHHHYYYYYYYYYYYYTTTTTTTVVVVVVVGGGGKKKKKKKKKEEEEEEEEESSSSSSIIIIIIIIDDDDDDDDLLLLLLLLVVVVVVVLLLLLLLLDDDDDDDDRRRRRRRRRRRIIIIIIIIRRRRRRRRRRRKKKKKKKKKLLLLLLLLTTTTTTTDDDDDDDDAAAAACCCCCCSSSSSSGGGGLLLLLLLLQQQQQQQQQGGGGFFFFFFFFFFFLLLLLLLLIIIIIIIIFFFFFFFFFFFHHHHHHHHHHSSSSSSFFFFFFFFFFFGGGGGGGGGGGGTTTTTTTGGGGSSSSSSGGGGFFFFFFFFFFFTTTTTTTSSSSSSLLLLLLLLLLLLLLLLMMMMMMMMEEEEEEEEERRRRRRRRRRRLLLLLLLLSSSSSSLLLLLLLLDDDDDDDDYYYYYYYYYYYYGGGGKKKKKKKKKKKKKKKKKKSSSSSSKKKKKKKKKLLLLLLLLEEEEEEEEEFFFFFFFFFFFAAAAAIIIIIIIIYYYYYYYYYYYYPPPPPPPAAAAAPPPPPPPQQQQQQQQQVVVVVVVSSSSSSTTTTTTTAAAAAVVVVVVVVVVVVVVEEEEEEEEEPPPPPPPYYYYYYYYYYYYNNNNNNNNSSSSSSIIIIIIIILLLLLLLLTTTTTTTTTTTTTTHHHHHHHHHHTTTTTTTTTTTTTTLLLLLLLLEEEEEEEEEHHHHHHHHHHSSSSSSDDDDDDDDCCCCCCAAAAAFFFFFFFFFFFMMMMMMMMVVVVVVVDDDDDDDDNNNNNNNNEEEEEEEEEAAAAAIIIIIIIIYYYYYYYYYYYYDDDDDDDDIIIIIIIICCCCCCRRRRRRRRRRRRRRRRRRRRRRNNNNNNNNLLLLLLLLDDDDDDDDIIIIIIIIEEEEEEEEERRRRRRRRRRRPPPPPPPTTTTTTTYYYYYYYYYYYYTTTTTTTNNNNNNNNLLLLLLLLNNNNNNNNRRRRRRRRRRRLLLLLLLLIIIIIIIISSSSSSQQQQQQQQQIIIIIIIIVVVVVVVSSSSSSSSSSSSIIIIIIIITTTTTTTAAAAASSSSSSLLLLLLLLRRRRRRRRRRRFFFFFFFFFFFDDDDDDDDGGGGAAAAALLLLLLLLNNNNNNNNVVVVVVVDDDDDDDDLLLLLLLLTTTTTTTEEEEEEEEEFFFFFFFFFFFQQQQQQQQQTTTTTTTNNNNNNNNLLLLLLLLVVVVVVVPPPPPPPYYYYYYYYYYYYPPPPPPPRRRRRRRRRRRIIIIIIIIHHHHHHHHHHFFFFFFFFFFFPPPPPPPLLLLLLLLVVVVVVVTTTTTTTYYYYYYYYYYYYAAAAAPPPPPPPIIIIIIIIIIIIIIIISSSSSSAAAAAEEEEEEEEEKKKKKKKKKAAAAAYYYYYYYYYYYYHHHHHHHHHHEEEEEEEEEQQQQQQQQQLLLLLLLLSSSSSSVVVVVVVAAAAAEEEEEEEEEIIIIIIIITTTTTTTSSSSSSSSSSSSCCCCCCFFFFFFFFFFFEEEEEEEEEPPPPPPPNNNNNNNNSSSSSSQQQQQQQQQMMMMMMMMVVVVVVVKKKKKKKKKCCCCCCDDDDDDDDPPPPPPPRRRRRRRRRRRHHHHHHHHHHGGGGKKKKKKKKKYYYYYYYYYYYYMMMMMMMMAAAAACCCCCCCCCCCCMMMMMMMMLLLLLLLLYYYYYYYYYYYYRRRRRRRRRRRGGGGDDDDDDDDVVVVVVVVVVVVVVPPPPPPPKKKKKKKKKDDDDDDDDVVVVVVVNNNNNNNNVVVVVVVAAAAAIIIIIIIIAAAAAAAAAAIIIIIIIIKKKKKKKKKTTTTTTTKKKKKKKKKRRRRRRRRRRRTTTTTTTIIIIIIIIQQQQQQQQQFFFFFFFFFFFVVVVVVVDDDDDDDDWWWWWWWWWWWWWWCCCCCCPPPPPPPTTTTTTTGGGGFFFFFFFFFFFKKKKKKKKKVVVVVVVGGGGIIIIIIIINNNNNNNNYYYYYYYYYYYYQQQQQQQQQPPPPPPPPPPPPPPTTTTTTTVVVVVVVVVVVVVVPPPPPPPGGGGGGGGDDDDDDDDLLLLLLLLAAAAAKKKKKKKKKVVVVVVVQQQQQQQQQRRRRRRRRRRRAAAAAVVVVVVVCCCCCCMMMMMMMMLLLLLLLLSSSSSSNNNNNNNNTTTTTTTTTTTTTTAAAAAIIIIIIIIAAAAAEEEEEEEEEAAAAAWWWWWWWWWWWWWWAAAAARRRRRRRRRRRLLLLLLLLDDDDDDDDHHHHHHHHHHKKKKKKKKKFFFFFFFFFFFDDDDDDDDLLLLLLLLMMMMMMMMYYYYYYYYYYYYAAAAAKKKKKKKKKRRRRRRRRRRRAAAAAFFFFFFFFFFFVVVVVVVHHHHHHHHHHWWWWWWWWWWWWWWYYYYYYYYYYYYVVVVVVVGGGGEEEEEEEEEGGGGMMMMMMMMEEEEEEEEEEEEEEEEEEGGGGEEEEEEEEEFFFFFFFFFFFSSSSSSEEEEEEEEEAAAAARRRRRRRRRRREEEEEEEEEDDDDDDDDLLLLLLLLAAAAAAAAAALLLLLLLLEEEEEEEEEKKKKKKKKKDDDDDDDDYYYYYYYYYYYYEEEEEEEEEEEEEEEEEEVVVVVVVGGGGTTTTTTTDDDDDDDDSSSSSSFFFFFFFFFFFEEEEEEEEEEEEEEEEEEEEEEEEEEENNNNNNNNEEEEEEEEEGGGGEEEEEEEEEEEEEEEEEEFFFFFFFFFFFF

SEQ ID NO: 65 - protein, 3270 aa, Ajellomyces capsulatus
MMMMMMMMRRRRRRRRRRREEEEEEEEEVVVVVVVVVVVVVVSSSSSSLLLLLLLLNNNNNNNNVVVVVVVGGGGQQQQQQQQQAAAAAGGGGGGGGQQQQQQQQQIIIIIIIIAAAAANNNNNNNNSSSSSSCCCCCCWWWWWWWWWWWWWWEEEEEEEEELLLLLLLLYYYYYYYYYYYYCCCCCCLLLLLLLLEEEEEEEEEHHHHHHHHHHGGGGIIIIIIIIQQQQQQQQQPPPPPPPDDDDDDDDGGGGYYYYYYYYYYYYLLLLLLLLTTTTTTTEEEEEEEEEEEEEEEEEERRRRRRRRRRRKKKKKKKKKAAAAAAAAAADDDDDDDDPPPPPPPDDDDDDDDQQQQQQQQQGGGGFFFFFFFFFFFNNNNNNNNTTTTTTTFFFFFFFFFFFFFFFFFFFFFFSSSSSSEEEEEEEEETTTTTTTGGGGQQQQQQQQQGGGGKKKKKKKKKYYYYYYYYYYYYVVVVVVVPPPPPPPRRRRRRRRRRRTTTTTTTIIIIIIIIYYYYYYYYYYYYCCCCCCDDDDDDDDLLLLLLLLEEEEEEEEEPPPPPPPNNNNNNNNVVVVVVVVVVVVVVDDDDDDDDEEEEEEEEEVVVVVVVRRRRRRRRRRRTTTTTTTGGGGPPPPPPPYYYYYYYYYYYYRRRRRRRRRRRAAAAALLLLLLLLFFFFFFFFFFFHHHHHHHHHHPPPPPPPEEEEEEEEEQQQQQQQQQMMMMMMMMIIIIIIIITTTTTTTGGGGKKKKKKKKKEEEEEEEEEDDDDDDDDAAAAASSSSSSNNNNNNNNNNNNNNNNYYYYYYYYYYYYAAAAARRRRRRRRRRRGGGGHHHHHHHHHHYYYYYYYYYYYYTTTTTTTVVVVVVVGGGGKKKKKKKKKEEEEEEEEEMMMMMMMMIIIIIIIIDDDDDDDDQQQQQQQQQCCCCCCLLLLLLLLDDDDDDDDKKKKKKKKKVVVVVVVRRRRRRRRRRRRRRRRRRRRRRVVVVVVVAAAAADDDDDDDDNNNNNNNNCCCCCCSSSSSSGGGGLLLLLLLLQQQQQQQQQGGGGFFFFFFFFFFFLLLLLLLLVVVVVVVFFFFFFFFFFFHHHHHHHHHHSSSSSSFFFFFFFFFFFGGGGGGGGGGGGQQQQQQQQQGGGGSSSSSSGGGGFFFFFFFFFFFGGGGAAAAALLLLLLLLLLLLLLLLMMMMMMMMEEEEEEEEERRRRRRRRRRRLLLLLLLLSSSSSSVVVVVVVDDDDDDDDYYYYYYYYYYYYGGGGKKKKKKKKKKKKKKKKKKTTTTTTTKKKKKKKKKLLLLLLLLEEEEEEEEEFFFFFFFFFFFCCCCCCVVVVVVVYYYYYYYYYYYYPPPPPPPAAAAAPPPPPPPQQQQQQQQQNNNNNNNNAAAAATTTTTTTSSSSSSVVVVVVVVVVVVVVEEEEEEEEEPPPPPPPYYYYYYYYYYYYNNNNNNNNSSSSSSIIIIIIIILLLLLLLLTTTTTTTTTTTTTTHHHHHHHHHHTTTTTTTTTTTTTTLLLLLLLLEEEEEEEEEHHHHHHHHHHSSSSSSDDDDDDDDVVVVVVVQQQQQQQQQFFFFFFFFFFFMMMMMMMMVVVVVVVDDDDDDDDNNNNNNNNEEEEEEEEEAAAAAIIIIIIIIYYYYYYYYYYYYDDDDDDDDIIIIIIIICCCCCCRRRRRRRRRRRRRRRRRRRRRRNNNNNNNNLLLLLLLLGGGGIIIIIIIIEEEEEEEEERRRRRRRRRRRPPPPPPPSSSSSSYYYYYYYYYYYYEEEEEEEEENNNNNNNNSSSSSSNNNNNNNNRRRRRRRRRRRLLLLLLLLMMMMMMMMAAAAAQQQQQQQQQGGGGQQQQQQQQQSSSSSSPPPPPPPIIIIIIIITTTTTTTAAAAAIIIIIIIIMMMMMMMMLLLLLLLLLLLLLLLLFFFFFFFFFFFDDDDDDDDCCCCCCAAAAALLLLLLLLNNNNNNNNVVVVVVVDDDDDDDDLLLLLLLLNNNNNNNNEEEEEEEEEFFFFFFFFFFFQQQQQQQQQTTTTTTTNNNNNNNNLLLLLLLLVVVVVVVPPPPPPPYYYYYYYYYYYYPPPPPPPRRRRRRRRRRRIIIIIIIIHHHHHHHHHHFFFFFFFFFFFPPPPPPPLLLLLLLLAAAAASSSSSSYYYYYYYYYYYYSSSSSSPPPPPPPVVVVVVVVVVVVVVSSSSSSAAAAAGGGGKKKKKKKKKAAAAASSSSSSHHHHHHHHHHEEEEEEEEESSSSSSNNNNNNNNSSSSSSVVVVVVVMMMMMMMMEEEEEEEEEVVVVVVVTTTTTTTIIIIIIIIVVVVVVVCCCCCCFFFFFFFFFFFEEEEEEEEEPPPPPPPNNNNNNNNNNNNNNNNQQQQQQQQQMMMMMMMMVVVVVVVKKKKKKKKKCCCCCCDDDDDDDDPPPPPPPRRRRRRRRRRRNNNNNNNNGGGGKKKKKKKKKYYYYYYYYYYYYMMMMMMMMAAAAATTTTTTTCCCCCCLLLLLLLLLLLLLLLLYYYYYYYYYYYYRRRRRRRRRRRGGGGDDDDDDDDVVVVVVVVVVVVVVPPPPPPPKKKKKKKKKDDDDDDDDVVVVVVVHHHHHHHHHHAAAAAVVVVVVVAAAAAAAAAATTTTTTTLLLLLLLLKKKKKKKKKTTTTTTTKKKKKKKKKRRRRRRRRRRRTTTTTTTVVVVVVVQQQQQQQQQFFFFFFFFFFFVVVVVVVDDDDDDDDLLLLLLLLQQQQQQQQQPPPPPPPTTTTTTTGGGGFFFFFFFFFFFKKKKKKKKKIIIIIIIIGGGGIIIIIIIICCCCCCYYYYYYYYYYYYQQQQQQQQQPPPPPPPPPPPPPPTTTTTTTMMMMMMMMVVVVVVVPPPPPPPNNNNNNNNGGGGDDDDDDDDLLLLLLLLAAAAAKKKKKKKKKVVVVVVVNNNNNNNNRRRRRRRRRRRAAAAACCCCCCMMMMMMMMLLLLLLLLSSSSSSNNNNNNNNTTTTTTTTTTTTTTAAAAAIIIIIIIISSSSSSEEEEEEEEEAAAAAWWWWWWWWWWWWWWTTTTTTTAAAAALLLLLLLLSSSSSSHHHHHHHHHHKKKKKKKKKFFFFFFFFFFFDDDDDDDDLLLLLLLLIIIIIIIIYYYYYYYYYYYYSSSSSSKKKKKKKKKRRRRRRRRRRRAAAAAFFFFFFFFFFFVVVVVVVHHHHHHHHHHWWWWWWWWWWWWWWYYYYYYYYYYYYVVVVVVVGGGGEEEEEEEEEGGGGMMMMMMMMEEEEEEEEEEEEEEEEEEGGGGEEEEEEEEEFFFFFFFFFFFF

SEQ ID NO: 66 - protein, 1675 aa, Pneumocystis carinii
VVVVVVVDDDDDDDDNNNNNNNNEEEEEEEEEAAAAAIIIIIIIIYYYYYYYYYYYYDDDDDDDDIIIIIIIICCCCCCRRRRRRRRRRRRRRRRRRRRRRNNNNNNNNLLLLLLLLGGGGIIIIIIIIEEEEEEEEERRRRRRRRRRRPPPPPPPGGGGYYYYYYYYYYYYTTTTTTTNNNNNNNNLLLLLLLLNNNNNNNNRRRRRRRRRRRLLLLLLLLIIIIIIIIAAAAAHHHHHHHHHHVVVVVVVVVVVVVVSSSSSSSSSSSSIIIIIIIITTTTTTTAAAAASSSSSSLLLLLLLLRRRRRRRRRRRFFFFFFFFFFFDDDDDDDDGGGGSSSSSSLLLLLLLLNNNNNNNNVVVVVVVDDDDDDDDLLLLLLLLNNNNNNNNEEEEEEEEEFFFFFFFFFFFQQQQQQQQQTTTTTTTNNNNNNNNLLLLLLLLVVVVVVVPPPPPPPYYYYYYYYYYYYPPPPPPPRRRRRRRRRRRIIIIIIIIHHHHHHHHHHFFFFFFFFFFFPPPPPPPLLLLLLLLVVVVVVVTTTTTTTYYYYYYYYYYYYAAAAAPPPPPPPVVVVVVVIIIIIIIISSSSSSAAAAAAAAAAKKKKKKKKKAAAAAVVVVVVVHHHHHHHHHHEEEEEEEEEAAAAANNNNNNNNSSSSSSVVVVVVVSSSSSSEEEEEEEEEIIIIIIIITTTTTTTNNNNNNNNAAAAACCCCCCFFFFFFFFFFFEEEEEEEEEPPPPPPPNNNNNNNNNNNNNNNNQQQQQQQQQMMMMMMMMVVVVVVVKKKKKKKKKCCCCCCDDDDDDDDPPPPPPPRRRRRRRRRRRNNNNNNNNGGGGKKKKKKKKKYYYYYYYYYYYYMMMMMMMMAAAAATTTTTTTCCCCCCLLLLLLLLLLLLLLLLYYYYYYYYYYYYRRRRRRRRRRRGGGGDDDDDDDDVVVVVVVVVVVVVVTTTTTTTKKKKKKKKKDDDDDDDDVVVVVVVNNNNNNNNAAAAAAAAAAVVVVVVVAAAAAAAAAAVVVVVVVRRRRRRRRRRRTTTTTTTKKKKKKKKKRRRRRRRRRRRTTTTTTTIIIIIIIIQQQQQQQQQFFFFFFFFFFFVVVVVVVDDDDDDDDWWWWWWWWWWWWWWCCCCCCPPPPPPPTTTTTTTGGGGFFFFFFFFFFFKKKKKKKKKLLLLLLLLGGGGVVVVVVVCCCCCCYYYYYYYYYYYYQQQQQQQQQPPPPPPPPPPPPPPQQQQQQQQQHHHHHHHHHHVVVVVVVPPPPPPPHHHHHHHHHHGGGGDDDDDDDDLLLLLLLLAAAAAKKKKKKKKKVVVVVVVDDDDDDDDRRRRRRRRRRRAAAAAVVVVVVVCCCCCCMMMMMMMMLLLLLLLLSSSSSSNNNNNNNNTTTTTTTTTTTTTTSSSSSSIIIIIIIIAAAAAEEEEEEEEEAAAAAWWWWWWWWWWWWWWPPPPPPPRRRRRRRRRRRLLLLLLLLDDDDDDDDHHHHHHHHHHKKKKKKKKKFFFFFFFFFFFDDDDDDDDLLLLLLLLMMMMMMMMYYYYYYYYYYYYSSSSSSKKKKKKKKKRRRRRRRRRRRAAAAAFFFFFFFFFFFVVVVVVVHHHHHHHHHHWWWWWWWWWWWWWWYYYYYYYYYYYYVVVVVVVGGGGEEEEEEEEEGGGGMMMMMMMMEEEEEEEEEEEEEEEEEEE

SEQ ID NO: 67 - protein, 3475 aa, Schizophyllum commune
MMMMMMMMRRRRRRRRRRREEEEEEEEEVVVVVVVVVVVVVVSSSSSSIIIIIIIIHHHHHHHHHHVVVVVVVGGGGQQQQQQQQQAAAAAGGGGVVVVVVVQQQQQQQQQIIIIIIIIGGGGNNNNNNNNAAAAACCCCCCWWWWWWWWWWWWWWEEEEEEEEELLLLLLLLYYYYYYYYYYYYTTTTTTTIIIIIIIIEEEEEEEEEHHHHHHHHHHGGGGLLLLLLLLSSSSSSPPPPPPPDDDDDDDDGGGGRRRRRRRRRRRLLLLLLLLSSSSSSDDDDDDDDDDDDDDDDSSSSSSPPPPPPPSSSSSSKKKKKKKKKHHHHHHHHHHDDDDDDDDDDDDDDDDGGGGFFFFFFFFFFFSSSSSSTTTTTTTFFFFFFFFFFFFFFFFFFFFFFSSSSSSEEEEEEEEETTTTTTTSSSSSSSSSSSSGGGGKKKKKKKKKYYYYYYYYYYYYVVVVVVVPPPPPPPRRRRRRRRRRRSSSSSSLLLLLLLLYYYYYYYYYYYYVVVVVVVDDDDDDDDLLLLLLLLEEEEEEEEEPPPPPPPNNNNNNNNVVVVVVVIIIIIIIIDDDDDDDDEEEEEEEEEVVVVVVVRRRRRRRRRRRNNNNNNNNGGGGPPPPPPPYYYYYYYYYYYYRRRRRRRRRRRSSSSSSLLLLLLLLFFFFFFFFFFFHHHHHHHHHHPPPPPPPEEEEEEEEETTTTTTTMMMMMMMMIIIIIIIITTTTTTTGGGGKKKKKKKKKEEEEEEEEEDDDDDDDDAAAAAAAAAASSSSSSNNNNNNNNYYYYYYYYYYYYAAAAARRRRRRRRRRRGGGGHHHHHHHHHHYYYYYYYYYYYYTTTTTTTIIIIIIIIGGGGKKKKKKKKKEEEEEEEEEQQQQQQQQQIIIIIIIIDDDDDDDDVVVVVVVVVVVVVVMMMMMMMMDDDDDDDDKKKKKKKKKVVVVVVVRRRRRRRRRRRRRRRRRRRRRRLLLLLLLLVVVVVVVDDDDDDDDNNNNNNNNCCCCCCNNNNNNNNGGGGLLLLLLLLQQQQQQQQQGGGGFFFFFFFFFFFFFFFFFFFFFFVVVVVVVFFFFFFFFFFFHHHHHHHHHHSSSSSSFFFFFFFFFFFGGGGGGGGGGGGTTTTTTTGGGGSSSSSSGGGGFFFFFFFFFFFGGGGAAAAALLLLLLLLIIIIIIIILLLLLLLLEEEEEEEEERRRRRRRRRRRLLLLLLLLSSSSSSTTTTTTTDDDDDDDDYYYYYYYYYYYYGGGGKKKKKKKKKKKKKKKKKKSSSSSSKKKKKKKKKLLLLLLLLEEEEEEEEEFFFFFFFFFFFSSSSSSVVVVVVVYYYYYYYYYYYYPPPPPPPAAAAAPPPPPPPTTTTTTTLLLLLLLLAAAAASSSSSSSSSSSSVVVVVVVVVVVVVVEEEEEEEEEPPPPPPPYYYYYYYYYYYYNNNNNNNNSSSSSSVVVVVVVLLLLLLLLTTTTTTTTTTTTTTHHHHHHHHHHTTTTTTTTTTTTTTLLLLLLLLEEEEEEEEEHHHHHHHHHHSSSSSSDDDDDDDDCCCCCCSSSSSSFFFFFFFFFFFMMMMMMMMVVVVVVVDDDDDDDDNNNNNNNNEEEEEEEEEAAAAAIIIIIIIIYYYYYYYYYYYYDDDDDDDDIIIIIIIICCCCCCKKKKKKKKKKKKKKKKKKNNNNNNNNLLLLLLLLNNNNNNNNIIIIIIIIAAAAAQQQQQQQQQPPPPPPPGGGGLLLLLLLLTTTTTTTNNNNNNNNLLLLLLLLNNNNNNNNRRRRRRRRRRRLLLLLLLLIIIIIIIIAAAAAQQQQQQQQQVVVVVVVVVVVVVVSSSSSSSSSSSSIIIIIIIITTTTTTTAAAAASSSSSSLLLLLLLLRRRRRRRRRRRFFFFFFFFFFFDDDDDDDDGGGGSSSSSSLLLLLLLLNNNNNNNNVVVVVVVDDDDDDDDLLLLLLLLNNNNNNNNEEEEEEEEEFFFFFFFFFFFQQQQQQQQQTTTTTTTNNNNNNNNLLLLLLLLVVVVVVVPPPPPPPFFFFFFFFFFFPPPPPPPRRRRRRRRRRRIIIIIIIIHHHHHHHHHHFFFFFFFFFFFPPPPPPPLLLLLLLLAAAAATTTTTTTLLLLLLLLAAAAAPPPPPPPIIIIIIIIVVVVVVVSSSSSSVVVVVVVDDDDDDDDKKKKKKKKKAAAAAGGGGHHHHHHHHHHEEEEEEEEESSSSSSNNNNNNNNSSSSSSVVVVVVVAAAAAEEEEEEEEEMMMMMMMMTTTTTTTYYYYYYYYYYYYSSSSSSCCCCCCFFFFFFFFFFFEEEEEEEEEPPPPPPPGGGGNNNNNNNNQQQQQQQQQMMMMMMMMVVVVVVVKKKKKKKKKCCCCCCDDDDDDDDPPPPPPPRRRRRRRRRRRDDDDDDDDGGGGKKKKKKKKKYYYYYYYYYYYYMMMMMMMMAAAAACCCCCCAAAAALLLLLLLLLLLLLLLLYYYYYYYYYYYYRRRRRRRRRRRGGGGDDDDDDDDVVVVVVVVVVVVVVPPPPPPPKKKKKKKKKDDDDDDDDTTTTTTTNNNNNNNNAAAAAAAAAAVVVVVVVAAAAALLLLLLLLIIIIIIIIKKKKKKKKKTTTTTTTKKKKKKKKKRRRRRRRRRRRTTTTTTTIIIIIIIIQQQQQQQQQFFFFFFFFFFFVVVVVVVDDDDDDDDWWWWWWWWWWWWWWCCCCCCPPPPPPPTTTTTTTGGGGFFFFFFFFFFFKKKKKKKKKLLLLLLLLGGGGIIIIIIIICCCCCCNNNNNNNNEEEEEEEEEPPPPPPPPPPPPPPAAAAAHHHHHHHHHHVVVVVVVPPPPPPPGGGGGGGGDDDDDDDDLLLLLLLLAAAAAKKKKKKKKKVVVVVVVKKKKKKKKKRRRRRRRRRRRSSSSSSMMMMMMMMCCCCCCMMMMMMMMLLLLLLLLSSSSSSNNNNNNNNTTTTTTTTTTTTTTAAAAAIIIIIIIISSSSSSSSSSSSAAAAAWWWWWWWWWWWWWWSSSSSSRRRRRRRRRRRLLLLLLLLDDDDDDDDHHHHHHHHHHKKKKKKKKKFFFFFFFFFFFDDDDDDDDLLLLLLLLLLLLLLLLYYYYYYYYYYYYSSSSSSKKKKKKKKKRRRRRRRRRRRAAAAAFFFFFFFFFFFVVVVVVVHHHHHHHHHHWWWWWWWWWWWWWWYYYYYYYYYYYYVVVVVVVGGGGEEEEEEEEEGGGGMMMMMMMMEEEEEEEEEEEEEEEEEEGGGGEEEEEEEEEFFFFFFFFFFFSSSSSSEEEEEEEEEAAAAARRRRRRRRRRRQQQQQQQQQDDDDDDDDLLLLLLLLAAAAAAAAAALLLLLLLLEEEEEEEEEKKKKKKKKKDDDDDDDDYYYYYYYYYYYYEEEEEEEEEEEEEEEEEEVVVVVVVGGGGMMMMMMMMDDDDDDDDSSSSSSAAAAADDDDDDDDAAAAAEEEEEEEEEEEEEEEEEEEEEEEEEEEAAAAAAAAAAEEEEEEEEEYYYYYYYYYYYYY

SEQ ID NO: 68 - protein, 3445 aa, Avena sativa
MMMMMMMMRRRRRRRRRRREEEEEEEEEIIIIIIIIIIIIIIIISSSSSSIIIIIIIIHHHHHHHHHHIIIIIIIIGGGGQQQQQQQQQAAAAAGGGGIIIIIIIIQQQQQQQQQVVVVVVVGGGGNNNNNNNNAAAAACCCCCCWWWWWWWWWWWWWWEEEEEEEEELLLLLLLLYYYYYYYYYYYYCCCCCCLLLLLLLLEEEEEEEEEHHHHHHHHHHGGGGIIIIIIIIQQQQQQQQQQQQQQQQQQDDDDDDDDGGGGTTTTTTTMMMMMMMMPPPPPPPSSSSSSDDDDDDDDTTTTTTTTTTTTTTVVVVVVVGGGGVVVVVVVAAAAAHHHHHHHHHHDDDDDDDDAAAAAFFFFFFFFFFFNNNNNNNNTTTTTTTFFFFFFFFFFFFFFFFFFFFFFSSSSSSEEEEEEEEETTTTTTTGGGGAAAAAGGGGKKKKKKKKKHHHHHHHHHHVVVVVVVPPPPPPPRRRRRRRRRRRAAAAAIIIIIIIIFFFFFFFFFFFVVVVVVVDDDDDDDDLLLLLLLLEEEEEEEEEPPPPPPPTTTTTTTVVVVVVVIIIIIIIIDDDDDDDDEEEEEEEEEVVVVVVVRRRRRRRRRRRTTTTTTTGGGGAAAAAYYYYYYYYYYYYRRRRRRRRRRRQQQQQQQQQLLLLLLLLFFFFFFFFFFFHHHHHHHHHHPPPPPPPEEEEEEEEEQQQQQQQQQLLLLLLLLIIIIIIIISSSSSSGGGGKKKKKKKKKEEEEEEEEEDDDDDDDDAAAAAAAAAANNNNNNNNNNNNNNNNFFFFFFFFFFFAAAAARRRRRRRRRRRGGGGHHHHHHHHHHYYYYYYYYYYYYTTTTTTTVVVVVVVGGGGKKKKKKKKKEEEEEEEEEIIIIIIIIVVVVVVVDDDDDDDDLLLLLLLLCCCCCCLLLLLLLLGGGGRRRRRRRRRRRVVVVVVVRRRRRRRRRRRQQQQQQQQQLLLLLLLLAAAAADDDDDDDDNNNNNNNNCCCCCCTTTTTTTGGGGLLLLLLLLQQQQQQQQQGGGGFFFFFFFFFFFLLLLLLLLVVVVVVVFFFFFFFFFFFNNNNNNNNAAAAAVVVVVVVGGGGGGGGGGGGTTTTTTTGGGGSSSSSSGGGGLLLLLLLLGGGGSSSSSSLLLLLLLLLLLLLLLLLLLLLLLLEEEEEEEEERRRRRRRRRRRLLLLLLLLSSSSSSVVVVVVVDDDDDDDDYYYYYYYYYYYYGGGGKKKKKKKKKKKKKKKKKKSSSSSSKKKKKKKKKLLLLLLLLGGGGFFFFFFFFFFFTTTTTTTIIIIIIIIYYYYYYYYYYYYPPPPPPPSSSSSSPPPPPPPQQQQQQQQQVVVVVVVSSSSSSTTTTTTTAAAAAVVVVVVVVVVVVVVEEEEEEEEEPPPPPPPYYYYYYYYYYYYNNNNNNNNSSSSSSVVVVVVVLLLLLLLLSSSSSSTTTTTTTHHHHHHHHHHSSSSSSLLLLLLLLLLLLLLLLEEEEEEEEEHHHHHHHHHHTTTTTTTDDDDDDDDVVVVVVVAAAAAVVVVVVVLLLLLLLLLLLLLLLLDDDDDDDDNNNNNNNNEEEEEEEEEAAAAAIIIIIIIIYYYYYYYYYYYYDDDDDDDDIIIIIIIICCCCCCRRRRRRRRRRRRRRRRRRRRRRSSSSSSLLLLLLLLDDDDDDDDIIIIIIIIEEEEEEEEERRRRRRRRRRRPPPPPPPTTTTTTTYYYYYYYYYYYYTTTTTTTNNNNNNNNLLLLLLLLNNNNNNNNRRRRRRRRRRRLLLLLLLLIIIIIIIISSSSSSQQQQQQQQQIIIIIIIIIIIIIIIISSSSSSSSSSSSLLLLLLLLTTTTTTTTTTTTTTSSSSSSLLLLLLLLRRRRRRRRRRRFFFFFFFFFFFDDDDDDDDGGGGAAAAAIIIIIIIINNNNNNNNVVVVVVVDDDDDDDDVVVVVVVTTTTTTTEEEEEEEEEFFFFFFFFFFFQQQQQQQQQTTTTTTTNNNNNNNNLLLLLLLLVVVVVVVPPPPPPPYYYYYYYYYYYYPPPPPPPRRRRRRRRRRRIIIIIIIIHHHHHHHHHHFFFFFFFFFFFMMMMMMMMLLLLLLLLSSSSSSSSSSSSYYYYYYYYYYYYAAAAAPPPPPPPVVVVVVVIIIIIIIISSSSSSAAAAAEEEEEEEEEKKKKKKKKKAAAAAYYYYYYYYYYYYHHHHHHHHHHEEEEEEEEEQQQQQQQQQLLLLLLLLSSSSSSVVVVVVVPPPPPPPEEEEEEEEEIIIIIIIITTTTTTTNNNNNNNNAAAAAVVVVVVVFFFFFFFFFFFEEEEEEEEEPPPPPPPSSSSSSSSSSSSMMMMMMMMMMMMMMMMAAAAAKKKKKKKKKCCCCCCDDDDDDDDPPPPPPPRRRRRRRRRRRHHHHHHHHHHGGGGKKKKKKKKKYYYYYYYYYYYYMMMMMMMMAAAAACCCCCCCCCCCCLLLLLLLLMMMMMMMMYYYYYYYYYYYYRRRRRRRRRRRGGGGDDDDDDDDVVVVVVVVVVVVVVPPPPPPPKKKKKKKKKDDDDDDDDVVVVVVVNNNNNNNNAAAAAAAAAAVVVVVVVVVVVVVVTTTTTTTIIIIIIIIKKKKKKKKKTTTTTTTKKKKKKKKKRRRRRRRRRRRTTTTTTTVVVVVVVQQQQQQQQQFFFFFFFFFFFVVVVVVVDDDDDDDDGGGGCCCCCCPPPPPPPTTTTTTTGGGGFFFFFFFFFFFKKKKKKKKKCCCCCCGGGGIIIIIIIINNNNNNNNYYYYYYYYYYYYQQQQQQQQQPPPPPPPPPPPPPPSSSSSSVVVVVVVVVVVVVVPPPPPPPGGGGGGGGDDDDDDDDLLLLLLLLAAAAAKKKKKKKKKVVVVVVVQQQQQQQQQRRRRRRRRRRRAAAAAVVVVVVVCCCCCCMMMMMMMMIIIIIIIISSSSSSNNNNNNNNNNNNNNNNTTTTTTTAAAAAVVVVVVVAAAAAEEEEEEEEEVVVVVVVFFFFFFFFFFFSSSSSSRRRRRRRRRRRIIIIIIIIDDDDDDDDHHHHHHHHHHKKKKKKKKKFFFFFFFFFFFDDDDDDDDLLLLLLLLMMMMMMMMYYYYYYYYYYYYAAAAAKKKKKKKKKRRRRRRRRRRRAAAAAFFFFFFFFFFFVVVVVVVHHHHHHHHHHWWWWWWWWWWWWWWYYYYYYYYYYYYVVVVVVVGGGGEEEEEEEEEGGGGMMMMMMMMEEEEEEEEEEEEEEEEEEGGGGEEEEEEEEEFFFFFFFFFFFSSSSSSEEEEEEEEEAAAAARRRRRRRRRRREEEEEEEEEDDDDDDDDLLLLLLLLAAAAAGGGGLLLLLLLLEEEEEEEEEKKKKKKKKKGGGGYYYYYYYYYYYYEEEEEEEEEEEEEEEEEEVVVVVVVGGGGAAAAAEEEEEEEEEGGGGAAAAADDDDDDDDDDDDDDDDEEEEEEEEEVVVVVVVTTTTTTTRRRRRRRRRRRGGGGG

SEQ ID NO: 69 - protein, 399 aa, Blepharisma japonicum
FFFFFFFFFFFVVVVVVVHHHHHHHHHHWWWWWWWWWWWWWWYYYYYYYYYYYYVVVVVVVGGGGEEEEEEEEEGGGGMMMMMMMMEEEEEEEEEEEEEEEEEEGGGGEEEEEEEEEFFFFFFFFFFFSSSSSSEEEEEEEEEAAAAARRRRRRRRRRREEEEEEEEEDDDDDDDDLLLLLLLLAAAAAAAAAALLLLLLLLEEEEEEEEEKKKKKKKKKDDDDDDDDYYYYYYYYYYYYEEEEEEEEEEEEEEEEEEVVVVVVVGGGGIIIIIIIIEEEEEEEEETTTTTTTAAAAAEEEEEEEEEAAAAAEEEEEEEEEGGGGEEEEEEEEEEEEEEEEEEEEEEEEEEEGGGGYYYYYYYYYYYYGGGGEEEEEEEEEEEEEEEEEELLLLLLLLL

SEQ ID NO: 70 - protein, 3507 aa, Bombyx mori
MMMMMMMMRRRRRRRRRRREEEEEEEEECCCCCCIIIIIIIISSSSSSVVVVVVVHHHHHHHHHHVVVVVVVGGGGQQQQQQQQQAAAAAGGGGVVVVVVVQQQQQQQQQIIIIIIIIGGGGNNNNNNNNAAAAACCCCCCWWWWWWWWWWWWWWEEEEEEEEELLLLLLLLYYYYYYYYYYYYCCCCCCLLLLLLLLEEEEEEEEEHHHHHHHHHHGGGGIIIIIIIIQQQQQQQQQPPPPPPPDDDDDDDDGGGGQQQQQQQQQMMMMMMMMPPPPPPPTTTTTTTDDDDDDDDKKKKKKKKKTTTTTTTIIIIIIIIGGGGGGGGGGGGDDDDDDDDDDDDDDDDSSSSSSFFFFFFFFFFFNNNNNNNNTTTTTTTFFFFFFFFFFFFFFFFFFFFFFSSSSSSEEEEEEEEETTTTTTTGGGGAAAAAGGGGKKKKKKKKKHHHHHHHHHHVVVVVVVPPPPPPPRRRRRRRRRRRAAAAALLLLLLLLFFFFFFFFFFFVVVVVVVDDDDDDDDLLLLLLLLEEEEEEEEEPPPPPPPTTTTTTTVVVVVVVVVVVVVVDDDDDDDDEEEEEEEEEVVVVVVVRRRRRRRRRRRTTTTTTTGGGGTTTTTTTYYYYYYYYYYYYRRRRRRRRRRRQQQQQQQQQLLLLLLLLFFFFFFFFFFFHHHHHHHHHHPPPPPPPEEEEEEEEEQQQQQQQQQLLLLLLLLIIIIIIIITTTTTTTGGGGKKKKKKKKKEEEEEEEEEDDDDDDDDAAAAAAAAAANNNNNNNNNNNNNNNNYYYYYYYYYYYYAAAAARRRRRRRRRRRGGGGHHHHHHHHHHYYYYYYYYYYYYTTTTTTTIIIIIIIIGGGGKKKKKKKKKEEEEEEEEEIIIIIIIIVVVVVVVDDDDDDDDLLLLLLLLVVVVVVVLLLLLLLLDDDDDDDDRRRRRRRRRRRIIIIIIIIRRRRRRRRRRRKKKKKKKKKLLLLLLLLAAAAADDDDDDDDQQQQQQQQQCCCCCCTTTTTTTGGGGLLLLLLLLQQQQQQQQQGGGGFFFFFFFFFFFLLLLLLLLIIIIIIIIFFFFFFFFFFFHHHHHHHHHHSSSSSSFFFFFFFFFFFGGGGGGGGGGGGTTTTTTTGGGGSSSSSSGGGGFFFFFFFFFFFTTTTTTTSSSSSSLLLLLLLLLLLLLLLLMMMMMMMMEEEEEEEEERRRRRRRRRRRLLLLLLLLSSSSSSVVVVVVVDDDDDDDDYYYYYYYYYYYYGGGGKKKKKKKKKKKKKKKKKKSSSSSSKKKKKKKKKLLLLLLLLEEEEEEEEEFFFFFFFFFFFAAAAAIIIIIIIIYYYYYYYYYYYYPPPPPPPAAAAAPPPPPPPQQQQQQQQQVVVVVVVSSSSSSTTTTTTTAAAAAVVVVVVVVVVVVVVEEEEEEEEEPPPPPPPYYYYYYYYYYYYNNNNNNNNSSSSSSIIIIIIIILLLLLLLLTTTTTTTTTTTTTTHHHHHHHHHHTTTTTTTTTTTTTTLLLLLLLLEEEEEEEEEHHHHHHHHHHSSSSSSDDDDDDDDCCCCCCAAAAAFFFFFFFFFFFMMMMMMMMVVVVVVVDDDDDDDDNNNNNNNNEEEEEEEEEAAAAAIIIIIIIIYYYYYYYYYYYYDDDDDDDDIIIIIIIICCCCCCRRRRRRRRRRRRRRRRRRRRRRNNNNNNNNLLLLLLLLDDDDDDDDIIIIIIIIEEEEEEEEEPPPPPPPPPPPPPPTTTTTTTYYYYYYYYYYYYTTTTTTTNNNNNNNNLLLLLLLLNNNNNNNNRRRRRRRRRRRLLLLLLLLIIIIIIIIGGGGQQQQQQQQQIIIIIIIIVVVVVVVSSSSSSSSSSSSIIIIIIIITTTTTTTAAAAASSSSSSLLLLLLLLRRRRRRRRRRRFFFFFFFFFFFDDDDDDDDGGGGAAAAALLLLLLLLNNNNNNNNVVVVVVVDDDDDDDDLLLLLLLLTTTTTTTEEEEEEEEEFFFFFFFFFFFQQQQQQQQQTTTTTTTNNNNNNNNLLLLLLLLVVVVVVVPPPPPPPYYYYYYYYYYYYPPPPPPPRRRRRRRRRRRIIIIIIIIHHHHHHHHHHFFFFFFFFFFFPPPPPPPLLLLLLLLVVVVVVVTTTTTTTYYYYYYYYYYYYAAAAAPPPPPPPVVVVVVVIIIIIIIISSSSSSAAAAAEEEEEEEEEKKKKKKKKKAAAAAYYYYYYYYYYYYHHHHHHHHHHEEEEEEEEEQQQQQQQQQLLLLLLLLSSSSSSVVVVVVVAAAAAEEEEEEEEEIIIIIIIITTTTTTTNNNNNNNNAAAAACCCCCCFFFFFFFFFFFEEEEEEEEEPPPPPPPAAAAANNNNNNNNQQQQQQQQQMMMMMMMMVVVVVVVKKKKKKKKKCCCCCCDDDDDDDDPPPPPPPRRRRRRRRRRRHHHHHHHHHHGGGGKKKKKKKKKYYYYYYYYYYYYMMMMMMMMAAAAACCCCCCCCCCCCMMMMMMMMLLLLLLLLYYYYYYYYYYYYRRRRRRRRRRRGGGGDDDDDDDDVVVVVVVVVVVVVVPPPPPPPKKKKKKKKKDDDDDDDDVVVVVVVNNNNNNNNAAAAAAAAAAIIIIIIIIAAAAATTTTTTTIIIIIIIIKKKKKKKKKTTTTTTTKKKKKKKKKRRRRRRRRRRRTTTTTTTIIIIIIIIQQQQQQQQQFFFFFFFFFFFVVVVVVVDDDDDDDDWWWWWWWWWWWWWWCCCCCCPPPPPPPTTTTTTTGGGGFFFFFFFFFFFKKKKKKKKKVVVVVVVGGGGIIIIIIIINNNNNNNNYYYYYYYYYYYYQQQQQQQQQPPPPPPPPPPPPPPTTTTTTTVVVVVVVVVVVVVVPPPPPPPGGGGGGGGDDDDDDDDLLLLLLLLAAAAAKKKKKKKKKVVVVVVVQQQQQQQQQRRRRRRRRRRRAAAAAVVVVVVVCCCCCCMMMMMMMMLLLLLLLLSSSSSSNNNNNNNNTTTTTTTTTTTTTTAAAAAIIIIIIIIAAAAAEEEEEEEEEAAAAAWWWWWWWWWWWWWWAAAAARRRRRRRRRRRLLLLLLLLDDDDDDDDHHHHHHHHHHKKKKKKKKKFFFFFFFFFFFDDDDDDDDLLLLLLLLMMMMMMMMYYYYYYYYYYYYAAAAAKKKKKKKKKRRRRRRRRRRRAAAAAFFFFFFFFFFFVVVVVVVHHHHHHHHHHWWWWWWWWWWWWWWYYYYYYYYYYYYVVVVVVVGGGGEEEEEEEEEGGGGMMMMMMMMEEEEEEEEEEEEEEEEEEGGGGEEEEEEEEEFFFFFFFFFFFSSSSSSEEEEEEEEEAAAAARRRRRRRRRRREEEEEEEEEDDDDDDDDLLLLLLLLAAAAAAAAAALLLLLLLLEEEEEEEEEKKKKKKKKKDDDDDDDDYYYYYYYYYYYYEEEEEEEEEEEEEEEEEEVVVVVVVGGGGMMMMMMMMDDDDDDDDSSSSSSAAAAAEEEEEEEEEGGGGEEEEEEEEEGGGGEEEEEEEEEGGGGAAAAAEEEEEEEEEEEEEEEEEEYYYYYYYYYYYYY

SEQ ID NO: 71 - protein, 3467 aa, Schizophyllum commune
MMMMMMMMRRRRRRRRRRREEEEEEEEEVVVVVVVIIIIIIIISSSSSSVVVVVVVHHHHHHHHHHVVVVVVVGGGGQQQQQQQQQAAAAAGGGGVVVVVVVQQQQQQQQQIIIIIIIIGGGGNNNNNNNNAAAAACCCCCCWWWWWWWWWWWWWWEEEEEEEEELLLLLLLLYYYYYYYYYYYYTTTTTTTLLLLLLLLEEEEEEEEEHHHHHHHHHHGGGGLLLLLLLLSSSSSSPPPPPPPDDDDDDDDGGGGRRRRRRRRRRRLLLLLLLLMMMMMMMMDDDDDDDDDDDDDDDDSSSSSSPPPPPPPSSSSSSKKKKKKKKKHHHHHHHHHHDDDDDDDDSSSSSSGGGGSSSSSSTTTTTTTFFFFFFFFFFFFFFFFFFFFFFSSSSSSEEEEEEEEETTTTTTTGGGGQQQQQQQQQGGGGKKKKKKKKKHHHHHHHHHHVVVVVVVPPPPPPPRRRRRRRRRRRRRRRRRRRRRRLLLLLLLLYYYYYYYYYYYYVVVVVVVDDDDDDDDLLLLLLLLEEEEEEEEEPPPPPPPGGGGVVVVVVVIIIIIIIIDDDDDDDDDDDDDDDDVVVVVVVKKKKKKKKKNNNNNNNNGGGGPPPPPPPYYYYYYYYYYYYRRRRRRRRRRRSSSSSSLLLLLLLLFFFFFFFFFFFHHHHHHHHHHPPPPPPPEEEEEEEEETTTTTTTMMMMMMMMIIIIIIIITTTTTTTGGGGKKKKKKKKKEEEEEEEEEDDDDDDDDAAAAAAAAAANNNNNNNNNNNNNNNNYYYYYYYYYYYYAAAAARRRRRRRRRRRGGGGHHHHHHHHHHYYYYYYYYYYYYTTTTTTTVVVVVVVGGGGKKKKKKKKKEEEEEEEEELLLLLLLLIIIIIIIIDDDDDDDDPPPPPPPVVVVVVVMMMMMMMMDDDDDDDDKKKKKKKKKLLLLLLLLRRRRRRRRRRRRRRRRRRRRRRLLLLLLLLAAAAADDDDDDDDNNNNNNNNCCCCCCSSSSSSGGGGRRRRRRRRRRRQQQQQQQQQGGGGLLLLLLLLFFFFFFFFFFFVVVVVVVFFFFFFFFFFFHHHHHHHHHHSSSSSSFFFFFFFFFFFGGGGGGGGGGGGTTTTTTTGGGGSSSSSSGGGGFFFFFFFFFFFGGGGAAAAALLLLLLLLLLLLLLLLLLLLLLLLEEEEEEEEERRRRRRRRRRRLLLLLLLLSSSSSSTTTTTTTDDDDDDDDYYYYYYYYYYYYGGGGKKKKKKKKKKKKKKKKKKAAAAAKKKKKKKKKLLLLLLLLEEEEEEEEEFFFFFFFFFFFCCCCCCVVVVVVVYYYYYYYYYYYYPPPPPPPAAAAAPPPPPPPQQQQQQQQQLLLLLLLLSSSSSSSSSSSSSSSSSSVVVVVVVVVVVVVVEEEEEEEEEPPPPPPPYYYYYYYYYYYYNNNNNNNNSSSSSSLLLLLLLLLLLLLLLLTTTTTTTTTTTTTTHHHHHHHHHHTTTTTTTTTTTTTTLLLLLLLLEEEEEEEEEHHHHHHHHHHSSSSSSDDDDDDDDCCCCCCSSSSSSFFFFFFFFFFFMMMMMMMMVVVVVVVDDDDDDDDNNNNNNNNEEEEEEEEEAAAAAIIIIIIIIYYYYYYYYYYYYDDDDDDDDIIIIIIIICCCCCCKKKKKKKKKKKKKKKKKKNNNNNNNNLLLLLLLLGGGGVVVVVVVAAAAAQQQQQQQQQPPPPPPPGGGGFFFFFFFFFFFTTTTTTTNNNNNNNNLLLLLLLLNNNNNNNNRRRRRRRRRRRLLLLLLLLIIIIIIIIAAAAAQQQQQQQQQVVVVVVVVVVVVVVSSSSSSSSSSSSIIIIIIIITTTTTTTAAAAASSSSSSLLLLLLLLRRRRRRRRRRRFFFFFFFFFFFDDDDDDDDGGGGSSSSSSLLLLLLLLNNNNNNNNVVVVVVVDDDDDDDDLLLLLLLLNNNNNNNNEEEEEEEEEFFFFFFFFFFFQQQQQQQQQTTTTTTTNNNNNNNNLLLLLLLLVVVVVVVPPPPPPPFFFFFFFFFFFPPPPPPPRRRRRRRRRRRIIIIIIIIHHHHHHHHHHFFFFFFFFFFFPPPPPPPLLLLLLLLAAAAASSSSSSYYYYYYYYYYYYAAAAAPPPPPPPLLLLLLLLLLLLLLLLSSSSSSAAAAAPPPPPPPRRRRRRRRRRRRRRRRRRRRRRQQQQQQQQQHHHHHHHHHHEEEEEEEEEQQQQQQQQQNNNNNNNNSSSSSSVVVVVVVEEEEEEEEEEEEEEEEEEMMMMMMMMTTTTTTTFFFFFFFFFFFSSSSSSCCCCCCFFFFFFFFFFFEEEEEEEEESSSSSSGGGGNNNNNNNNQQQQQQQQQMMMMMMMMVVVVVVVKKKKKKKKKCCCCCCDDDDDDDDAAAAAKKKKKKKKKDDDDDDDDGGGGKKKKKKKKKYYYYYYYYYYYYMMMMMMMMAAAAACCCCCCCCCCCCLLLLLLLLLLLLLLLLYYYYYYYYYYYYRRRRRRRRRRRGGGGDDDDDDDDVVVVVVVVVVVVVVPPPPPPPKKKKKKKKKDDDDDDDDTTTTTTTQQQQQQQQQAAAAAAAAAAVVVVVVVAAAAASSSSSSIIIIIIIIKKKKKKKKKTTTTTTTKKKKKKKKKRRRRRRRRRRRTTTTTTTIIIIIIIIQQQQQQQQQFFFFFFFFFFFVVVVVVVDDDDDDDDWWWWWWWWWWWWWWCCCCCCPPPPPPPTTTTTTTGGGGFFFFFFFFFFFKKKKKKKKKLLLLLLLLGGGGVVVVVVVCCCCCCNNNNNNNNEEEEEEEEEAAAAAPPPPPPPAAAAATTTTTTTVVVVVVVPPPPPPPGGGGGGGGDDDDDDDDLLLLLLLLAAAAAKKKKKKKKKVVVVVVVPPPPPPPRRRRRRRRRRRSSSSSSLLLLLLLLCCCCCCMMMMMMMMLLLLLLLLSSSSSSNNNNNNNNTTTTTTTTTTTTTTAAAAAIIIIIIIIAAAAAAAAAAAAAAAWWWWWWWWWWWWWWNNNNNNNNRRRRRRRRRRRLLLLLLLLDDDDDDDDYYYYYYYYYYYYKKKKKKKKKFFFFFFFFFFFDDDDDDDDLLLLLLLLMMMMMMMMYYYYYYYYYYYYRRRRRRRRRRRKKKKKKKKKRRRRRRRRRRRAAAAAFFFFFFFFFFFVVVVVVVHHHHHHHHHHWWWWWWWWWWWWWWYYYYYYYYYYYYVVVVVVVGGGGEEEEEEEEEAAAAAMMMMMMMMEEEEEEEEEEEEEEEEEEGGGGEEEEEEEEEFFFFFFFFFFFSSSSSSEEEEEEEEEAAAAARRRRRRRRRRREEEEEEEEEDDDDDDDDLLLLLLLLAAAAAAAAAALLLLLLLLEEEEEEEEEKKKKKKKKKDDDDDDDDYYYYYYYYYYYYEEEEEEEEEEEEEEEEEEVVVVVVVGGGGTTTTTTTDDDDDDDDSSSSSSAAAAADDDDDDDDAAAAAEEEEEEEEEEEEEEEEEEEEEEEEEEEGGGGEEEEEEEEEYYYYYYYYYYYYY

SEQ ID NO: 72 - protein, 3512 aa, Candida albicans
MMMMMMMMRRRRRRRRRRREEEEEEEEEVVVVVVVIIIIIIIISSSSSSIIIIIIIINNNNNNNNVVVVVVVGGGGQQQQQQQQQAAAAAGGGGCCCCCCQQQQQQQQQIIIIIIIIGGGGNNNNNNNNAAAAACCCCCCWWWWWWWWWWWWWWEEEEEEEEELLLLLLLLYYYYYYYYYYYYSSSSSSQQQQQQQQQEEEEEEEEEHHHHHHHHHHGGGGIIIIIIIIRRRRRRRRRRRPPPPPPPDDDDDDDDGGGGYYYYYYYYYYYYLLLLLLLLQQQQQQQQQEEEEEEEEEGGGGLLLLLLLLDDDDDDDDRRRRRRRRRRRPPPPPPPKKKKKKKKKGGGGGGGGEEEEEEEEEEEEEEEEEEGGGGFFFFFFFFFFFSSSSSSTTTTTTTFFFFFFFFFFFFFFFFFFFFFFSSSSSSEEEEEEEEETTTTTTTGGGGSSSSSSGGGGKKKKKKKKKYYYYYYYYYYYYVVVVVVVPPPPPPPRRRRRRRRRRRAAAAALLLLLLLLYYYYYYYYYYYYVVVVVVVDDDDDDDDLLLLLLLLEEEEEEEEEPPPPPPPNNNNNNNNVVVVVVVIIIIIIIIDDDDDDDDEEEEEEEEEVVVVVVVRRRRRRRRRRRTTTTTTTGGGGVVVVVVVYYYYYYYYYYYYKKKKKKKKKDDDDDDDDLLLLLLLLFFFFFFFFFFFHHHHHHHHHHPPPPPPPEEEEEEEEEQQQQQQQQQLLLLLLLLIIIIIIIIAAAAAGGGGKKKKKKKKKEEEEEEEEEDDDDDDDDAAAAAAAAAANNNNNNNNNNNNNNNNYYYYYYYYYYYYAAAAARRRRRRRRRRRGGGGHHHHHHHHHHYYYYYYYYYYYYTTTTTTTVVVVVVVGGGGRRRRRRRRRRREEEEEEEEEIIIIIIIILLLLLLLLDDDDDDDDDDDDDDDDIIIIIIIILLLLLLLLDDDDDDDDRRRRRRRRRRRVVVVVVVRRRRRRRRRRRRRRRRRRRRRRMMMMMMMMSSSSSSDDDDDDDDQQQQQQQQQCCCCCCDDDDDDDDGGGGLLLLLLLLQQQQQQQQQGGGGFFFFFFFFFFFLLLLLLLLFFFFFFFFFFFTTTTTTTHHHHHHHHHHSSSSSSLLLLLLLLGGGGGGGGGGGGTTTTTTTGGGGSSSSSSGGGGLLLLLLLLGGGGSSSSSSLLLLLLLLLLLLLLLLLLLLLLLLEEEEEEEEEQQQQQQQQQLLLLLLLLSSSSSSLLLLLLLLDDDDDDDDYYYYYYYYYYYYGGGGKKKKKKKKKKKKKKKKKKSSSSSSKKKKKKKKKLLLLLLLLEEEEEEEEEFFFFFFFFFFFAAAAAVVVVVVVYYYYYYYYYYYYPPPPPPPAAAAAPPPPPPPQQQQQQQQQVVVVVVVSSSSSSTTTTTTTSSSSSSVVVVVVVVVVVVVVEEEEEEEEEPPPPPPPYYYYYYYYYYYYNNNNNNNNTTTTTTTVVVVVVVLLLLLLLLTTTTTTTTTTTTTTHHHHHHHHHHTTTTTTTTTTTTTTLLLLLLLLEEEEEEEEEHHHHHHHHHHAAAAADDDDDDDDCCCCCCTTTTTTTFFFFFFFFFFFMMMMMMMMVVVVVVVDDDDDDDDNNNNNNNNEEEEEEEEEAAAAAIIIIIIIIYYYYYYYYYYYYDDDDDDDDMMMMMMMMCCCCCCRRRRRRRRRRRRRRRRRRRRRRNNNNNNNNLLLLLLLLDDDDDDDDIIIIIIIIAAAAARRRRRRRRRRRPPPPPPPNNNNNNNNFFFFFFFFFFFSSSSSSSSSSSSLLLLLLLLNNNNNNNNNNNNNNNNLLLLLLLLIIIIIIIIAAAAAQQQQQQQQQVVVVVVVVVVVVVVSSSSSSSSSSSSVVVVVVVTTTTTTTAAAAASSSSSSLLLLLLLLRRRRRRRRRRRFFFFFFFFFFFDDDDDDDDGGGGSSSSSSLLLLLLLLNNNNNNNNVVVVVVVDDDDDDDDLLLLLLLLNNNNNNNNEEEEEEEEEFFFFFFFFFFFQQQQQQQQQTTTTTTTNNNNNNNNLLLLLLLLVVVVVVVPPPPPPPYYYYYYYYYYYYPPPPPPPRRRRRRRRRRRIIIIIIIIHHHHHHHHHHFFFFFFFFFFFPPPPPPPLLLLLLLLVVVVVVVSSSSSSYYYYYYYYYYYYAAAAAPPPPPPPVVVVVVVFFFFFFFFFFFSSSSSSKKKKKKKKKSSSSSSRRRRRRRRRRRAAAAATTTTTTTHHHHHHHHHHEEEEEEEEEAAAAANNNNNNNNSSSSSSVVVVVVVSSSSSSEEEEEEEEEIIIIIIIITTTTTTTQQQQQQQQQSSSSSSCCCCCCFFFFFFFFFFFEEEEEEEEEPPPPPPPGGGGNNNNNNNNQQQQQQQQQMMMMMMMMVVVVVVVKKKKKKKKKCCCCCCDDDDDDDDPPPPPPPRRRRRRRRRRRTTTTTTTGGGGKKKKKKKKKYYYYYYYYYYYYMMMMMMMMAAAAATTTTTTTCCCCCCLLLLLLLLLLLLLLLLYYYYYYYYYYYYRRRRRRRRRRRGGGGDDDDDDDDVVVVVVVVVVVVVVTTTTTTTRRRRRRRRRRRDDDDDDDDVVVVVVVQQQQQQQQQNNNNNNNNAAAAAVVVVVVVAAAAAQQQQQQQQQVVVVVVVKKKKKKKKKSSSSSSKKKKKKKKKKKKKKKKKKTTTTTTTVVVVVVVQQQQQQQQQLLLLLLLLVVVVVVVDDDDDDDDWWWWWWWWWWWWWWCCCCCCPPPPPPPTTTTTTTGGGGFFFFFFFFFFFKKKKKKKKKIIIIIIIIGGGGIIIIIIIICCCCCCYYYYYYYYYYYYQQQQQQQQQPPPPPPPPPPPPPPTTTTTTTAAAAAIIIIIIIIKKKKKKKKKGGGGSSSSSSEEEEEEEEELLLLLLLLAAAAASSSSSSAAAAASSSSSSRRRRRRRRRRRAAAAAVVVVVVVCCCCCCMMMMMMMMLLLLLLLLSSSSSSNNNNNNNNTTTTTTTTTTTTTTAAAAAIIIIIIIIAAAAAEEEEEEEEEAAAAAWWWWWWWWWWWWWWRRRRRRRRRRRRRRRRRRRRRRIIIIIIIIDDDDDDDDRRRRRRRRRRRKKKKKKKKKFFFFFFFFFFFDDDDDDDDLLLLLLLLMMMMMMMMYYYYYYYYYYYYSSSSSSKKKKKKKKKRRRRRRRRRRRAAAAAFFFFFFFFFFFVVVVVVVHHHHHHHHHHWWWWWWWWWWWWWWYYYYYYYYYYYYVVVVVVVGGGGEEEEEEEEEGGGGMMMMMMMMEEEEEEEEEEEEEEEEEEGGGGEEEEEEEEEFFFFFFFFFFFTTTTTTTEEEEEEEEEAAAAARRRRRRRRRRREEEEEEEEEDDDDDDDDLLLLLLLLAAAAAAAAAALLLLLLLLEEEEEEEEERRRRRRRRRRRDDDDDDDDYYYYYYYYYYYYIIIIIIIIEEEEEEEEEVVVVVVVGGGGTTTTTTTDDDDDDDDSSSSSSFFFFFFFFFFFPPPPPPPEEEEEEEEEEEEEEEEEEEEEEEEEEEEEEEEEEEEEEEEEEEEEYYYYYYYYYYYYY

SEQ ID NO: 73 - protein, 3490 aa, Chlorella vulgaris
MMMMMMMMRRRRRRRRRRREEEEEEEEEVVVVVVVIIIIIIIISSSSSSIIIIIIIIHHHHHHHHHHIIIIIIIIGGGGQQQQQQQQQAAAAAGGGGIIIIIIIIQQQQQQQQQVVVVVVVGGGGNNNNNNNNAAAAACCCCCCWWWWWWWWWWWWWWEEEEEEEEELLLLLLLLYYYYYYYYYYYYCCCCCCLLLLLLLLEEEEEEEEEHHHHHHHHHHGGGGIIIIIIIIQQQQQQQQQPPPPPPPDDDDDDDDGGGGQQQQQQQQQMMMMMMMMPPPPPPPSSSSSSDDDDDDDDKKKKKKKKKTTTTTTTIIIIIIIIGGGGGGGGGGGGDDDDDDDDDDDDDDDDAAAAAFFFFFFFFFFFNNNNNNNNTTTTTTTFFFFFFFFFFFFFFFFFFFFFFSSSSSSEEEEEEEEETTTTTTTGGGGAAAAAGGGGKKKKKKKKKHHHHHHHHHHVVVVVVVPPPPPPPRRRRRRRRRRRCCCCCCVVVVVVVFFFFFFFFFFFLLLLLLLLDDDDDDDDLLLLLLLLEEEEEEEEEPPPPPPPTTTTTTTVVVVVVVIIIIIIIIDDDDDDDDEEEEEEEEEVVVVVVVRRRRRRRRRRRTTTTTTTGGGGTTTTTTTYYYYYYYYYYYYRRRRRRRRRRRQQQQQQQQQLLLLLLLLFFFFFFFFFFFHHHHHHHHHHPPPPPPPEEEEEEEEEQQQQQQQQQLLLLLLLLIIIIIIIISSSSSSGGGGKKKKKKKKKEEEEEEEEEDDDDDDDDAAAAAAAAAANNNNNNNNNNNNNNNNFFFFFFFFFFFAAAAARRRRRRRRRRRGGGGHHHHHHHHHHYYYYYYYYYYYYTTTTTTTIIIIIIIIGGGGKKKKKKKKKEEEEEEEEEIIIIIIIIVVVVVVVDDDDDDDDLLLLLLLLCCCCCCLLLLLLLLDDDDDDDDRRRRRRRRRRRIIIIIIIIRRRRRRRRRRRKKKKKKKKKLLLLLLLLAAAAADDDDDDDDNNNNNNNNCCCCCCTTTTTTTGGGGLLLLLLLLQQQQQQQQQGGGGFFFFFFFFFFFLLLLLLLLVVVVVVVFFFFFFFFFFFNNNNNNNNAAAAAVVVVVVVGGGGGGGGGGGGTTTTTTTGGGGSSSSSSGGGGLLLLLLLLGGGGSSSSSSLLLLLLLLLLLLLLLLLLLLLLLLEEEEEEEEERRRRRRRRRRRLLLLLLLLSSSSSSVVVVVVVDDDDDDDDYYYYYYYYYYYYGGGGKKKKKKKKKKKKKKKKKKSSSSSSKKKKKKKKKLLLLLLLLGGGGFFFFFFFFFFFTTTTTTTVVVVVVVYYYYYYYYYYYYPPPPPPPSSSSSSPPPPPPPQQQQQQQQQVVVVVVVSSSSSSTTTTTTTAAAAAVVVVVVVVVVVVVVEEEEEEEEEPPPPPPPYYYYYYYYYYYYNNNNNNNNSSSSSSVVVVVVVLLLLLLLLSSSSSSTTTTTTTHHHHHHHHHHSSSSSSLLLLLLLLLLLLLLLLEEEEEEEEEHHHHHHHHHHTTTTTTTDDDDDDDDVVVVVVVSSSSSSVVVVVVVMMMMMMMMLLLLLLLLDDDDDDDDNNNNNNNNEEEEEEEEEAAAAAVVVVVVVYYYYYYYYYYYYDDDDDDDDIIIIIIIICCCCCCRRRRRRRRRRRRRRRRRRRRRRSSSSSSLLLLLLLLDDDDDDDDIIIIIIIIEEEEEEEEERRRRRRRRRRRPPPPPPPTTTTTTTYYYYYYYYYYYYTTTTTTTNNNNNNNNLLLLLLLLNNNNNNNNRRRRRRRRRRRLLLLLLLLIIIIIIIIAAAAAQQQQQQQQQVVVVVVVIIIIIIIISSSSSSSSSSSSLLLLLLLLTTTTTTTAAAAASSSSSSLLLLLLLLRRRRRRRRRRRFFFFFFFFFFFDDDDDDDDGGGGAAAAALLLLLLLLNNNNNNNNVVVVVVVDDDDDDDDVVVVVVVTTTTTTTEEEEEEEEEFFFFFFFFFFFQQQQQQQQQTTTTTTTNNNNNNNNLLLLLLLLVVVVVVVPPPPPPPYYYYYYYYYYYYPPPPPPPRRRRRRRRRRRIIIIIIIIHHHHHHHHHHFFFFFFFFFFFMMMMMMMMLLLLLLLLSSSSSSSSSSSSYYYYYYYYYYYYSSSSSSPPPPPPPVVVVVVVIIIIIIIISSSSSSAAAAAEEEEEEEEEKKKKKKKKKAAAAAYYYYYYYYYYYYHHHHHHHHHHEEEEEEEEEQQQQQQQQQLLLLLLLLSSSSSSVVVVVVVAAAAAEEEEEEEEEIIIIIIIITTTTTTTNNNNNNNNSSSSSSAAAAAFFFFFFFFFFFEEEEEEEEEPPPPPPPAAAAASSSSSSMMMMMMMMMMMMMMMMAAAAAKKKKKKKKKCCCCCCDDDDDDDDPPPPPPPRRRRRRRRRRRHHHHHHHHHHGGGGKKKKKKKKKYYYYYYYYYYYYMMMMMMMMAAAAACCCCCCCCCCCCLLLLLLLLMMMMMMMMYYYYYYYYYYYYRRRRRRRRRRRGGGGDDDDDDDDVVVVVVVVVVVVVVPPPPPPPKKKKKKKKKDDDDDDDDVVVVVVVNNNNNNNNAAAAAAAAAAVVVVVVVAAAAATTTTTTTIIIIIIIIKKKKKKKKKTTTTTTTKKKKKKKKKRRRRRRRRRRRTTTTTTTIIIIIIIIQQQQQQQQQFFFFFFFFFFFVVVVVVVDDDDDDDDWWWWWWWWWWWWWWCCCCCCPPPPPPPTTTTTTTGGGGFFFFFFFFFFFKKKKKKKKKCCCCCCGGGGIIIIIIIINNNNNNNNYYYYYYYYYYYYQQQQQQQQQPPPPPPPPPPPPPPTTTTTTTVVVVVVVVVVVVVVPPPPPPPGGGGGGGGDDDDDDDDLLLLLLLLAAAAAKKKKKKKKKVVVVVVVQQQQQQQQQRRRRRRRRRRRAAAAAVVVVVVVCCCCCCMMMMMMMMIIIIIIIISSSSSSNNNNNNNNSSSSSSTTTTTTTAAAAAIIIIIIIIAAAAAEEEEEEEEEVVVVVVVFFFFFFFFFFFSSSSSSRRRRRRRRRRRLLLLLLLLDDDDDDDDHHHHHHHHHHKKKKKKKKKFFFFFFFFFFFDDDDDDDDLLLLLLLLMMMMMMMMYYYYYYYYYYYYAAAAAKKKKKKKKKRRRRRRRRRRRAAAAAFFFFFFFFFFFVVVVVVVHHHHHHHHHHWWWWWWWWWWWWWWYYYYYYYYYYYYVVVVVVVGGGGEEEEEEEEEGGGGMMMMMMMMEEEEEEEEEEEEEEEEEEGGGGEEEEEEEEEFFFFFFFFFFFSSSSSSEEEEEEEEEAAAAARRRRRRRRRRREEEEEEEEEDDDDDDDDLLLLLLLLAAAAAAAAAALLLLLLLLEEEEEEEEEKKKKKKKKKDDDDDDDDYYYYYYYYYYYYEEEEEEEEEEEEEEEEEEVVVVVVVGGGGAAAAAEEEEEEEEESSSSSSAAAAAEEEEEEEEEAAAAADDDDDDDDGGGGEEEEEEEEEDDDDDDDDEEEEEEEEEGGGGEEEEEEEEEEEEEEEEEEYYYYYYYYYYYYY

SEQ ID NO: 74 - protein, 3578 aa, Dictyostelium discoideum
MMMMMMMMGGGGRRRRRRRRRRREEEEEEEEEIIIIIIIIIIIIIIIISSSSSSIIIIIIIIHHHHHHHHHHIIIIIIIIGGGGQQQQQQQQQAAAAAGGGGVVVVVVVQQQQQQQQQVVVVVVVGGGGNNNNNNNNSSSSSSCCCCCCWWWWWWWWWWWWWWEEEEEEEEELLLLLLLLYYYYYYYYYYYYCCCCCCLLLLLLLLEEEEEEEEEHHHHHHHHHHGGGGIIIIIIIIEEEEEEEEERRRRRRRRRRRDDDDDDDDGGGGSSSSSSIIIIIIIIPPPPPPPAAAAADDDDDDDDRRRRRRRRRRRKKKKKKKKKQQQQQQQQQSSSSSSSSSSSSDDDDDDDDVVVVVVVNNNNNNNNNNNNNNNNLLLLLLLLNNNNNNNNKKKKKKKKKDDDDDDDDLLLLLLLLGGGGTTTTTTTFFFFFFFFFFFFFFFFFFFFFFSSSSSSEEEEEEEEESSSSSSTTTTTTTNNNNNNNNGGGGKKKKKKKKKKKKKKKKKKVVVVVVVVVVVVVVPPPPPPPRRRRRRRRRRRAAAAAIIIIIIIIFFFFFFFFFFFLLLLLLLLDDDDDDDDLLLLLLLLEEEEEEEEEPPPPPPPTTTTTTTVVVVVVVIIIIIIIIDDDDDDDDEEEEEEEEEIIIIIIIIRRRRRRRRRRRTTTTTTTGGGGDDDDDDDDYYYYYYYYYYYYKKKKKKKKKNNNNNNNNLLLLLLLLFFFFFFFFFFFHHHHHHHHHHPPPPPPPEEEEEEEEEQQQQQQQQQLLLLLLLLIIIIIIIITTTTTTTGGGGKKKKKKKKKEEEEEEEEEDDDDDDDDAAAAAAAAAANNNNNNNNNNNNNNNNYYYYYYYYYYYYAAAAARRRRRRRRRRRGGGGHHHHHHHHHHYYYYYYYYYYYYTTTTTTTVVVVVVVGGGGKKKKKKKKKEEEEEEEEELLLLLLLLIIIIIIIIDDDDDDDDVVVVVVVCCCCCCVVVVVVVDDDDDDDDRRRRRRRRRRRIIIIIIIIRRRRRRRRRRRRRRRRRRRRRRLLLLLLLLAAAAADDDDDDDDQQQQQQQQQCCCCCCDDDDDDDDGGGGLLLLLLLLQQQQQQQQQGGGGFFFFFFFFFFFLLLLLLLLVVVVVVVFFFFFFFFFFFHHHHHHHHHHSSSSSSVVVVVVVGGGGGGGGGGGGTTTTTTTGGGGSSSSSSGGGGFFFFFFFFFFFGGGGSSSSSSLLLLLLLLLLLLLLLLLLLLLLLLQQQQQQQQQKKKKKKKKKLLLLLLLLAAAAALLLLLLLLDDDDDDDDYYYYYYYYYYYYGGGGGGGGKKKKKKKKKKKKKKKKKKSSSSSSKKKKKKKKKLLLLLLLLDDDDDDDDFFFFFFFFFFFCCCCCCVVVVVVVYYYYYYYYYYYYPPPPPPPSSSSSSPPPPPPPQQQQQQQQQVVVVVVVSSSSSSTTTTTTTSSSSSSVVVVVVVVVVVVVVEEEEEEEEEPPPPPPPYYYYYYYYYYYYNNNNNNNNSSSSSSVVVVVVVLLLLLLLLSSSSSSTTTTTTTHHHHHHHHHHSSSSSSLLLLLLLLLLLLLLLLEEEEEEEEEHHHHHHHHHHTTTTTTTDDDDDDDDVVVVVVVSSSSSSFFFFFFFFFFFMMMMMMMMLLLLLLLLDDDDDDDDNNNNNNNNEEEEEEEEEAAAAAIIIIIIIIYYYYYYYYYYYYNNNNNNNNIIIIIIIICCCCCCKKKKKKKKKNNNNNNNNSSSSSSLLLLLLLLDDDDDDDDIIIIIIIIEEEEEEEEEKKKKKKKKKPPPPPPPTTTTTTTYYYYYYYYYYYYTTTTTTTNNNNNNNNLLLLLLLLNNNNNNNNRRRRRRRRRRRLLLLLLLLIIIIIIIIAAAAAQQQQQQQQQVVVVVVVIIIIIIIISSSSSSSSSSSSLLLLLLLLTTTTTTTSSSSSSSSSSSSLLLLLLLLRRRRRRRRRRRFFFFFFFFFFFPPPPPPPGGGGQQQQQQQQQLLLLLLLLNNNNNNNNLLLLLLLLDDDDDDDDIIIIIIIINNNNNNNNDDDDDDDDIIIIIIIIQQQQQQQQQTTTTTTTNNNNNNNNLLLLLLLLVVVVVVVPPPPPPPFFFFFFFFFFFPPPPPPPRRRRRRRRRRRLLLLLLLLHHHHHHHHHHFFFFFFFFFFFVVVVVVVLLLLLLLLCCCCCCSSSSSSYYYYYYYYYYYYAAAAAPPPPPPPVVVVVVVIIIIIIIISSSSSSRRRRRRRRRRREEEEEEEEEKKKKKKKKKAAAAAHHHHHHHHHHHHHHHHHHHHEEEEEEEEETTTTTTTIIIIIIIITTTTTTTVVVVVVVDDDDDDDDNNNNNNNNIIIIIIIITTTTTTTSSSSSSAAAAAVVVVVVVFFFFFFFFFFFSSSSSSEEEEEEEEEKKKKKKKKKNNNNNNNNIIIIIIIIMMMMMMMMAAAAAKKKKKKKKKCCCCCCQQQQQQQQQPPPPPPPNNNNNNNNLLLLLLLLGGGGKKKKKKKKKYYYYYYYYYYYYMMMMMMMMAAAAACCCCCCCCCCCCLLLLLLLLMMMMMMMMYYYYYYYYYYYYRRRRRRRRRRRGGGGDDDDDDDDIIIIIIIIVVVVVVVPPPPPPPKKKKKKKKKEEEEEEEEEAAAAAQQQQQQQQQKKKKKKKKKAAAAAVVVVVVVQQQQQQQQQNNNNNNNNIIIIIIIIRRRRRRRRRRRSSSSSSEEEEEEEEEKKKKKKKKKSSSSSSRRRRRRRRRRRNNNNNNNNVVVVVVVSSSSSSFFFFFFFFFFFVVVVVVVDDDDDDDDWWWWWWWWWWWWWWSSSSSSPPPPPPPTTTTTTTGGGGFFFFFFFFFFFKKKKKKKKKCCCCCCGGGGIIIIIIIINNNNNNNNNNNNNNNNQQQQQQQQQAAAAAPPPPPPPVVVVVVVSSSSSSTTTTTTTKKKKKKKKKDDDDDDDDSSSSSSEEEEEEEEEMMMMMMMMAAAAAEEEEEEEEEVVVVVVVKKKKKKKKKKKKKKKKKKSSSSSSVVVVVVVCCCCCCMMMMMMMMLLLLLLLLSSSSSSNNNNNNNNTTTTTTTTTTTTTTAAAAAIIIIIIIISSSSSSQQQQQQQQQVVVVVVVFFFFFFFFFFFSSSSSSRRRRRRRRRRRIIIIIIIINNNNNNNNHHHHHHHHHHKKKKKKKKKFFFFFFFFFFFDDDDDDDDLLLLLLLLMMMMMMMMFFFFFFFFFFFVVVVVVVKKKKKKKKKRRRRRRRRRRRAAAAAFFFFFFFFFFFVVVVVVVHHHHHHHHHHWWWWWWWWWWWWWWYYYYYYYYYYYYVVVVVVVGGGGEEEEEEEEEGGGGMMMMMMMMEEEEEEEEEEEEEEEEEEGGGGEEEEEEEEEFFFFFFFFFFFAAAAAEEEEEEEEEAAAAARRRRRRRRRRRDDDDDDDDDDDDDDDDLLLLLLLLLLLLLLLLAAAAALLLLLLLLEEEEEEEEEKKKKKKKKKDDDDDDDDYYYYYYYYYYYYEEEEEEEEESSSSSSVVVVVVVSSSSSSAAAAASSSSSSTTTTTTTEEEEEEEEEGGGGEEEEEEEEEEEEEEEEEEQQQQQQQQQEEEEEEEEEEEEEEEEEEEEEEEEEEEYYYYYYYYYYYYY

SEQ ID NO: 75 - protein, 3501 aa, Physarum polycephalum
MMMMMMMMRRRRRRRRRRREEEEEEEEEVVVVVVVIIIIIIIISSSSSSIIIIIIIIHHHHHHHHHHIIIIIIIIGGGGQQQQQQQQQAAAAAGGGGTTTTTTTQQQQQQQQQVVVVVVVGGGGNNNNNNNNAAAAACCCCCCWWWWWWWWWWWWWWEEEEEEEEELLLLLLLLYYYYYYYYYYYYCCCCCCLLLLLLLLEEEEEEEEEHHHHHHHHHHGGGGIIIIIIIIQQQQQQQQQPPPPPPPDDDDDDDDGGGGQQQQQQQQQMMMMMMMMPPPPPPPSSSSSSDDDDDDDDKKKKKKKKKSSSSSSVVVVVVVGGGGYYYYYYYYYYYYGGGGDDDDDDDDDDDDDDDDAAAAAFFFFFFFFFFFNNNNNNNNTTTTTTTFFFFFFFFFFFFFFFFFFFFFFSSSSSSEEEEEEEEETTTTTTTGGGGAAAAAGGGGKKKKKKKKKHHHHHHHHHHVVVVVVVPPPPPPPRRRRRRRRRRRAAAAAVVVVVVVFFFFFFFFFFFLLLLLLLLDDDDDDDDLLLLLLLLEEEEEEEEEPPPPPPPTTTTTTTVVVVVVVIIIIIIIIDDDDDDDDEEEEEEEEEVVVVVVVRRRRRRRRRRRTTTTTTTGGGGTTTTTTTYYYYYYYYYYYYRRRRRRRRRRRQQQQQQQQQLLLLLLLLFFFFFFFFFFFHHHHHHHHHHPPPPPPPEEEEEEEEEQQQQQQQQQLLLLLLLLIIIIIIIITTTTTTTGGGGKKKKKKKKKEEEEEEEEEDDDDDDDDAAAAAAAAAANNNNNNNNNNNNNNNNYYYYYYYYYYYYAAAAARRRRRRRRRRRGGGGHHHHHHHHHHYYYYYYYYYYYYTTTTTTTIIIIIIIIGGGGKKKKKKKKKEEEEEEEEEIIIIIIIIVVVVVVVDDDDDDDDLLLLLLLLCCCCCCLLLLLLLLDDDDDDDDRRRRRRRRRRRVVVVVVVRRRRRRRRRRRKKKKKKKKKLLLLLLLLAAAAADDDDDDDDQQQQQQQQQCCCCCCTTTTTTTGGGGLLLLLLLLQQQQQQQQQGGGGFFFFFFFFFFFLLLLLLLLVVVVVVVFFFFFFFFFFFHHHHHHHHHHSSSSSSVVVVVVVGGGGGGGGGGGGTTTTTTTGGGGSSSSSSGGGGFFFFFFFFFFFGGGGSSSSSSLLLLLLLLLLLLLLLLLLLLLLLLEEEEEEEEERRRRRRRRRRRLLLLLLLLSSSSSSVVVVVVVDDDDDDDDYYYYYYYYYYYYGGGGKKKKKKKKKKKKKKKKKKSSSSSSKKKKKKKKKLLLLLLLLDDDDDDDDFFFFFFFFFFFCCCCCCVVVVVVVYYYYYYYYYYYYPPPPPPPSSSSSSPPPPPPPQQQQQQQQQVVVVVVVSSSSSSTTTTTTTAAAAAVVVVVVVVVVVVVVEEEEEEEEEPPPPPPPYYYYYYYYYYYYNNNNNNNNSSSSSSVVVVVVVLLLLLLLLSSSSSSTTTTTTTHHHHHHHHHHSSSSSSLLLLLLLLLLLLLLLLEEEEEEEEEHHHHHHHHHHTTTTTTTDDDDDDDDVVVVVVVAAAAAFFFFFFFFFFFMMMMMMMMLLLLLLLLDDDDDDDDNNNNNNNNEEEEEEEEEAAAAAIIIIIIIIYYYYYYYYYYYYDDDDDDDDIIIIIIIICCCCCCKKKKKKKKKRRRRRRRRRRRAAAAALLLLLLLLDDDDDDDDIIIIIIIIDDDDDDDDRRRRRRRRRRRPPPPPPPTTTTTTTYYYYYYYYYYYYTTTTTTTNNNNNNNNLLLLLLLLNNNNNNNNRRRRRRRRRRRLLLLLLLLVVVVVVVAAAAAQQQQQQQQQVVVVVVVIIIIIIIISSSSSSSSSSSSLLLLLLLLTTTTTTTTTTTTTTSSSSSSLLLLLLLLRRRRRRRRRRRFFFFFFFFFFFDDDDDDDDGGGGAAAAALLLLLLLLNNNNNNNNVVVVVVVDDDDDDDDIIIIIIIITTTTTTTEEEEEEEEEFFFFFFFFFFFQQQQQQQQQTTTTTTTNNNNNNNNLLLLLLLLVVVVVVVPPPPPPPYYYYYYYYYYYYPPPPPPPRRRRRRRRRRRIIIIIIIIHHHHHHHHHHFFFFFFFFFFFMMMMMMMMLLLLLLLLCCCCCCSSSSSSYYYYYYYYYYYYAAAAAPPPPPPPVVVVVVVIIIIIIIISSSSSSAAAAAEEEEEEEEEKKKKKKKKKAAAAAYYYYYYYYYYYYHHHHHHHHHHEEEEEEEEEQQQQQQQQQLLLLLLLLTTTTTTTVVVVVVVAAAAAEEEEEEEEEIIIIIIIITTTTTTTNNNNNNNNSSSSSSVVVVVVVFFFFFFFFFFFEEEEEEEEEPPPPPPPAAAAANNNNNNNNMMMMMMMMMMMMMMMMAAAAAKKKKKKKKKCCCCCCDDDDDDDDPPPPPPPRRRRRRRRRRRHHHHHHHHHHGGGGKKKKKKKKKYYYYYYYYYYYYMMMMMMMMAAAAACCCCCCCCCCCCLLLLLLLLMMMMMMMMYYYYYYYYYYYYRRRRRRRRRRRGGGGDDDDDDDDVVVVVVVVVVVVVVPPPPPPPKKKKKKKKKDDDDDDDDVVVVVVVNNNNNNNNAAAAASSSSSSVVVVVVVAAAAAVVVVVVVIIIIIIIIKKKKKKKKKTTTTTTTKKKKKKKKKRRRRRRRRRRRTTTTTTTIIIIIIIIQQQQQQQQQFFFFFFFFFFFVVVVVVVDDDDDDDDWWWWWWWWWWWWWWCCCCCCPPPPPPPTTTTTTTGGGGFFFFFFFFFFFKKKKKKKKKCCCCCCGGGGIIIIIIIINNNNNNNNYYYYYYYYYYYYQQQQQQQQQPPPPPPPPPPPPPPTTTTTTTVVVVVVVVVVVVVVPPPPPPPGGGGGGGGDDDDDDDDLLLLLLLLAAAAAKKKKKKKKKVVVVVVVQQQQQQQQQRRRRRRRRRRRAAAAAVVVVVVVCCCCCCMMMMMMMMLLLLLLLLSSSSSSNNNNNNNNTTTTTTTTTTTTTTAAAAAIIIIIIIIAAAAAEEEEEEEEEVVVVVVVFFFFFFFFFFFSSSSSSRRRRRRRRRRRIIIIIIIIDDDDDDDDHHHHHHHHHHKKKKKKKKKFFFFFFFFFFFDDDDDDDDLLLLLLLLMMMMMMMMYYYYYYYYYYYYAAAAAKKKKKKKKKRRRRRRRRRRRAAAAAFFFFFFFFFFFVVVVVVVHHHHHHHHHHWWWWWWWWWWWWWWYYYYYYYYYYYYVVVVVVVGGGGEEEEEEEEEGGGGMMMMMMMMEEEEEEEEEEEEEEEEEEGGGGEEEEEEEEEFFFFFFFFFFFSSSSSSEEEEEEEEEAAAAARRRRRRRRRRREEEEEEEEEDDDDDDDDLLLLLLLLAAAAAAAAAALLLLLLLLEEEEEEEEEKKKKKKKKKDDDDDDDDYYYYYYYYYYYYEEEEEEEEEEEEEEEEEEVVVVVVVGGGGAAAAAEEEEEEEEESSSSSSSSSSSSEEEEEEEEEAAAAAGGGGGGGGDDDDDDDDEEEEEEEEEEEEEEEEEEGGGGEEEEEEEEEYYYYYYYYYYYYY

SEQ ID NO: 76 - protein, 3485 aa, Physarum polycephalum
MMMMMMMMRRRRRRRRRRREEEEEEEEEIIIIIIIILLLLLLLLSSSSSSIIIIIIIIHHHHHHHHHHIIIIIIIIGGGGQQQQQQQQQAAAAAGGGGAAAAAQQQQQQQQQVVVVVVVGGGGNNNNNNNNAAAAACCCCCCWWWWWWWWWWWWWWEEEEEEEEELLLLLLLLYYYYYYYYYYYYCCCCCCLLLLLLLLEEEEEEEEEHHHHHHHHHHGGGGIIIIIIIIKKKKKKKKKPPPPPPPDDDDDDDDGGGGQQQQQQQQQMMMMMMMMPPPPPPPSSSSSSDDDDDDDDKKKKKKKKKSSSSSSVVVVVVVGGGGGGGGGGGGDDDDDDDDDDDDDDDDAAAAAFFFFFFFFFFFNNNNNNNNTTTTTTTFFFFFFFFFFFFFFFFFFFFFFSSSSSSEEEEEEEEETTTTTTTSSSSSSSSSSSSGGGGKKKKKKKKKHHHHHHHHHHVVVVVVVPPPPPPPRRRRRRRRRRRAAAAAIIIIIIIIFFFFFFFFFFFLLLLLLLLDDDDDDDDLLLLLLLLEEEEEEEEEPPPPPPPTTTTTTTVVVVVVVIIIIIIIIDDDDDDDDEEEEEEEEEIIIIIIIIRRRRRRRRRRRTTTTTTTGGGGTTTTTTTYYYYYYYYYYYYRRRRRRRRRRRQQQQQQQQQLLLLLLLLFFFFFFFFFFFHHHHHHHHHHPPPPPPPEEEEEEEEEQQQQQQQQQLLLLLLLLIIIIIIIITTTTTTTGGGGKKKKKKKKKEEEEEEEEEDDDDDDDDAAAAAAAAAANNNNNNNNNNNNNNNNYYYYYYYYYYYYAAAAARRRRRRRRRRRGGGGHHHHHHHHHHYYYYYYYYYYYYTTTTTTTVVVVVVVGGGGKKKKKKKKKEEEEEEEEELLLLLLLLVVVVVVVDDDDDDDDLLLLLLLLCCCCCCLLLLLLLLDDDDDDDDRRRRRRRRRRRVVVVVVVRRRRRRRRRRRKKKKKKKKKLLLLLLLLAAAAADDDDDDDDQQQQQQQQQCCCCCCSSSSSSGGGGLLLLLLLLQQQQQQQQQGGGGFFFFFFFFFFFLLLLLLLLVVVVVVVFFFFFFFFFFFHHHHHHHHHHSSSSSSVVVVVVVGGGGGGGGGGGGTTTTTTTGGGGSSSSSSGGGGFFFFFFFFFFFGGGGSSSSSSLLLLLLLLLLLLLLLLLLLLLLLLEEEEEEEEERRRRRRRRRRRLLLLLLLLSSSSSSVVVVVVVDDDDDDDDYYYYYYYYYYYYGGGGKKKKKKKKKKKKKKKKKKSSSSSSKKKKKKKKKLLLLLLLLDDDDDDDDFFFFFFFFFFFCCCCCCVVVVVVVYYYYYYYYYYYYPPPPPPPSSSSSSPPPPPPPQQQQQQQQQVVVVVVVSSSSSSTTTTTTTAAAAAVVVVVVVVVVVVVVEEEEEEEEEPPPPPPPYYYYYYYYYYYYNNNNNNNNSSSSSSVVVVVVVLLLLLLLLSSSSSSTTTTTTTHHHHHHHHHHGGGGLLLLLLLLLLLLLLLLEEEEEEEEEHHHHHHHHHHTTTTTTTDDDDDDDDVVVVVVVAAAAAFFFFFFFFFFFMMMMMMMMLLLLLLLLDDDDDDDDNNNNNNNNEEEEEEEEEAAAAAIIIIIIIIYYYYYYYYYYYYDDDDDDDDLLLLLLLLCCCCCCKKKKKKKKKRRRRRRRRRRRSSSSSSLLLLLLLLDDDDDDDDIIIIIIIIEEEEEEEEERRRRRRRRRRRPPPPPPPSSSSSSYYYYYYYYYYYYAAAAANNNNNNNNLLLLLLLLNNNNNNNNRRRRRRRRRRRLLLLLLLLVVVVVVVAAAAAQQQQQQQQQVVVVVVVIIIIIIIISSSSSSSSSSSSLLLLLLLLTTTTTTTTTTTTTTSSSSSSLLLLLLLLRRRRRRRRRRRFFFFFFFFFFFDDDDDDDDGGGGAAAAALLLLLLLLNNNNNNNNVVVVVVVDDDDDDDDIIIIIIIITTTTTTTEEEEEEEEEFFFFFFFFFFFQQQQQQQQQTTTTTTTNNNNNNNNLLLLLLLLVVVVVVVPPPPPPPYYYYYYYYYYYYPPPPPPPRRRRRRRRRRRIIIIIIIIHHHHHHHHHHFFFFFFFFFFFMMMMMMMMLLLLLLLLAAAAASSSSSSYYYYYYYYYYYYAAAAAPPPPPPPVVVVVVVIIIIIIIISSSSSSAAAAAEEEEEEEEEKKKKKKKKKAAAAAFFFFFFFFFFFHHHHHHHHHHEEEEEEEEEQQQQQQQQQLLLLLLLLSSSSSSVVVVVVVAAAAAEEEEEEEEELLLLLLLLTTTTTTTNNNNNNNNTTTTTTTVVVVVVVFFFFFFFFFFFDDDDDDDDPPPPPPPSSSSSSSSSSSSMMMMMMMMMMMMMMMMAAAAAKKKKKKKKKCCCCCCDDDDDDDDPPPPPPPRRRRRRRRRRRHHHHHHHHHHGGGGKKKKKKKKKYYYYYYYYYYYYMMMMMMMMAAAAACCCCCCCCCCCCLLLLLLLLMMMMMMMMYYYYYYYYYYYYRRRRRRRRRRRGGGGDDDDDDDDVVVVVVVVVVVVVVPPPPPPPKKKKKKKKKDDDDDDDDVVVVVVVNNNNNNNNAAAAAAAAAAVVVVVVVAAAAAVVVVVVVIIIIIIIIKKKKKKKKKTTTTTTTKKKKKKKKKRRRRRRRRRRRTTTTTTTIIIIIIIIQQQQQQQQQFFFFFFFFFFFVVVVVVVDDDDDDDDWWWWWWWWWWWWWWCCCCCCPPPPPPPTTTTTTTGGGGFFFFFFFFFFFKKKKKKKKKCCCCCCGGGGIIIIIIIINNNNNNNNYYYYYYYYYYYYQQQQQQQQQPPPPPPPPPPPPPPSSSSSSVVVVVVVVVVVVVVPPPPPPPGGGGGGGGDDDDDDDDLLLLLLLLAAAAAKKKKKKKKKVVVVVVVQQQQQQQQQRRRRRRRRRRRAAAAALLLLLLLLCCCCCCMMMMMMMMIIIIIIIISSSSSSNNNNNNNNTTTTTTTTTTTTTTAAAAAIIIIIIIIAAAAAEEEEEEEEEVVVVVVVFFFFFFFFFFFSSSSSSRRRRRRRRRRRIIIIIIIIDDDDDDDDHHHHHHHHHHKKKKKKKKKFFFFFFFFFFFDDDDDDDDLLLLLLLLMMMMMMMMYYYYYYYYYYYYAAAAAKKKKKKKKKRRRRRRRRRRRAAAAAFFFFFFFFFFFVVVVVVVHHHHHHHHHHWWWWWWWWWWWWWWYYYYYYYYYYYYVVVVVVVGGGGEEEEEEEEEGGGGMMMMMMMMEEEEEEEEEEEEEEEEEEVVVVVVVEEEEEEEEEFFFFFFFFFFFSSSSSSEEEEEEEEEAAAAARRRRRRRRRRREEEEEEEEEDDDDDDDDLLLLLLLLAAAAAAAAAALLLLLLLLEEEEEEEEEKKKKKKKKKDDDDDDDDYYYYYYYYYYYYEEEEEEEEEEEEEEEEEEVVVVVVVGGGGAAAAAEEEEEEEEETTTTTTTAAAAAEEEEEEEEEDDDDDDDDDDDDDDDDGGGGAAAAADDDDDDDDEEEEEEEEEEEEEEEEEEMMMMMMMMM

SEQ ID NO: 77 - protein, 3506 aa, Euglena gracilis
MMMMMMMMRRRRRRRRRRREEEEEEEEEIIIIIIIIIIIIIIIISSSSSSIIIIIIIIHHHHHHHHHHLLLLLLLLGGGGQQQQQQQQQGGGGGGGGIIIIIIIIQQQQQQQQQIIIIIIIIGGGGNNNNNNNNAAAAACCCCCCWWWWWWWWWWWWWWEEEEEEEEELLLLLLLLYYYYYYYYYYYYCCCCCCLLLLLLLLEEEEEEEEEHHHHHHHHHHGGGGIIIIIIIIQQQQQQQQQPPPPPPPDDDDDDDDGGGGSSSSSSMMMMMMMMPPPPPPPSSSSSSDDDDDDDDKKKKKKKKKAAAAAIIIIIIIIGGGGVVVVVVVEEEEEEEEEDDDDDDDDDDDDDDDDAAAAAFFFFFFFFFFFNNNNNNNNTTTTTTTFFFFFFFFFFFFFFFFFFFFFFSSSSSSEEEEEEEEETTTTTTTGGGGAAAAAGGGGKKKKKKKKKHHHHHHHHHHVVVVVVVPPPPPPPRRRRRRRRRRRAAAAAVVVVVVVFFFFFFFFFFFLLLLLLLLDDDDDDDDLLLLLLLLEEEEEEEEEPPPPPPPSSSSSSVVVVVVVVVVVVVVDDDDDDDDEEEEEEEEEVVVVVVVRRRRRRRRRRRTTTTTTTGGGGTTTTTTTYYYYYYYYYYYYRRRRRRRRRRRQQQQQQQQQLLLLLLLLFFFFFFFFFFFHHHHHHHHHHPPPPPPPEEEEEEEEEQQQQQQQQQLLLLLLLLIIIIIIIISSSSSSGGGGKKKKKKKKKEEEEEEEEEDDDDDDDDAAAAAAAAAANNNNNNNNNNNNNNNNYYYYYYYYYYYYAAAAARRRRRRRRRRRGGGGHHHHHHHHHHYYYYYYYYYYYYTTTTTTTIIIIIIIIGGGGKKKKKKKKKEEEEEEEEEIIIIIIIIVVVVVVVDDDDDDDDLLLLLLLLCCCCCCLLLLLLLLDDDDDDDDRRRRRRRRRRRIIIIIIIIRRRRRRRRRRRKKKKKKKKKLLLLLLLLAAAAADDDDDDDDNNNNNNNNCCCCCCTTTTTTTGGGGLLLLLLLLQQQQQQQQQGGGGFFFFFFFFFFFLLLLLLLLAAAAAFFFFFFFFFFFHHHHHHHHHHAAAAAVVVVVVVGGGGGGGGGGGGTTTTTTTGGGGSSSSSSGGGGLLLLLLLLGGGGRRRRRRRRRRRLLLLLLLLLLLLLLLLLLLLLLLLEEEEEEEEERRRRRRRRRRRLLLLLLLLSSSSSSVVVVVVVDDDDDDDDYYYYYYYYYYYYGGGGKKKKKKKKKKKKKKKKKKSSSSSSKKKKKKKKKLLLLLLLLGGGGFFFFFFFFFFFTTTTTTTIIIIIIIIYYYYYYYYYYYYPPPPPPPSSSSSSPPPPPPPQQQQQQQQQIIIIIIIISSSSSSTTTTTTTAAAAAVVVVVVVVVVVVVVEEEEEEEEEPPPPPPPYYYYYYYYYYYYNNNNNNNNSSSSSSVVVVVVVLLLLLLLLSSSSSSTTTTTTTHHHHHHHHHHSSSSSSLLLLLLLLLLLLLLLLEEEEEEEEEHHHHHHHHHHTTTTTTTDDDDDDDDVVVVVVVAAAAAVVVVVVVMMMMMMMMLLLLLLLLDDDDDDDDNNNNNNNNEEEEEEEEEAAAAAIIIIIIIIYYYYYYYYYYYYDDDDDDDDIIIIIIIICCCCCCRRRRRRRRRRRRRRRRRRRRRRNNNNNNNNLLLLLLLLDDDDDDDDIIIIIIIIEEEEEEEEERRRRRRRRRRRPPPPPPPTTTTTTTYYYYYYYYYYYYTTTTTTTNNNNNNNNLLLLLLLLNNNNNNNNRRRRRRRRRRRLLLLLLLLIIIIIIIIAAAAAQQQQQQQQQVVVVVVVIIIIIIIISSSSSSSSSSSSLLLLLLLLTTTTTTTAAAAASSSSSSLLLLLLLLRRRRRRRRRRRFFFFFFFFFFFDDDDDDDDGGGGAAAAALLLLLLLLNNNNNNNNVVVVVVVDDDDDDDDIIIIIIIITTTTTTTEEEEEEEEEFFFFFFFFFFFQQQQQQQQQTTTTTTTNNNNNNNNLLLLLLLLVVVVVVVPPPPPPPYYYYYYYYYYYYPPPPPPPRRRRRRRRRRRIIIIIIIIHHHHHHHHHHFFFFFFFFFFFVVVVVVVLLLLLLLLSSSSSSSSSSSSYYYYYYYYYYYYAAAAAPPPPPPPIIIIIIIIIIIIIIIISSSSSSAAAAAEEEEEEEEEKKKKKKKKKAAAAAYYYYYYYYYYYYHHHHHHHHHHEEEEEEEEEQQQQQQQQQLLLLLLLLSSSSSSVVVVVVVAAAAAEEEEEEEEEIIIIIIIITTTTTTTNNNNNNNNAAAAAAAAAAFFFFFFFFFFFEEEEEEEEEPPPPPPPAAAAASSSSSSMMMMMMMMMMMMMMMMAAAAAKKKKKKKKKCCCCCCDDDDDDDDPPPPPPPRRRRRRRRRRRHHHHHHHHHHGGGGKKKKKKKKKYYYYYYYYYYYYMMMMMMMMAAAAACCCCCCCCCCCCLLLLLLLLMMMMMMMMYYYYYYYYYYYYRRRRRRRRRRRGGGGDDDDDDDDVVVVVVVVVVVVVVPPPPPPPKKKKKKKKKDDDDDDDDVVVVVVVNNNNNNNNAAAAASSSSSSVVVVVVVAAAAATTTTTTTIIIIIIIIKKKKKKKKKTTTTTTTKKKKKKKKKRRRRRRRRRRRTTTTTTTIIIIIIIIQQQQQQQQQFFFFFFFFFFFVVVVVVVDDDDDDDDWWWWWWWWWWWWWWCCCCCCPPPPPPPTTTTTTTGGGGFFFFFFFFFFFKKKKKKKKKCCCCCCGGGGIIIIIIIINNNNNNNNYYYYYYYYYYYYQQQQQQQQQPPPPPPPPPPPPPPTTTTTTTVVVVVVVVVVVVVVPPPPPPPGGGGGGGGDDDDDDDDLLLLLLLLAAAAAKKKKKKKKKVVVVVVVQQQQQQQQQRRRRRRRRRRRAAAAAVVVVVVVCCCCCCMMMMMMMMIIIIIIIISSSSSSNNNNNNNNSSSSSSTTTTTTTAAAAAIIIIIIIIAAAAAEEEEEEEEEVVVVVVVFFFFFFFFFFFAAAAARRRRRRRRRRRIIIIIIIIDDDDDDDDHHHHHHHHHHKKKKKKKKKFFFFFFFFFFFDDDDDDDDLLLLLLLLMMMMMMMMYYYYYYYYYYYYSSSSSSKKKKKKKKKRRRRRRRRRRRAAAAAFFFFFFFFFFFVVVVVVVHHHHHHHHHHWWWWWWWWWWWWWWYYYYYYYYYYYYVVVVVVVGGGGEEEEEEEEEGGGGMMMMMMMMEEEEEEEEEEEEEEEEEEGGGGEEEEEEEEEFFFFFFFFFFFSSSSSSEEEEEEEEEAAAAARRRRRRRRRRREEEEEEEEEDDDDDDDDLLLLLLLLAAAAAAAAAALLLLLLLLEEEEEEEEEKKKKKKKKKDDDDDDDDYYYYYYYYYYYYEEEEEEEEEEEEEEEEEEVVVVVVVGGGGAAAAAEEEEEEEEESSSSSSAAAAADDDDDDDDVVVVVVVEEEEEEEEEGGGGEEEEEEEEEEEEEEEEEEDDDDDDDDVVVVVVVEEEEEEEEEEEEEEEEEEYYYYYYYYYYYYY

SEQ ID NO: 78 - protein, 3480 aa, Euplotes octocarinatus
MMMMMMMMRRRRRRRRRRREEEEEEEEEVVVVVVVIIIIIIIISSSSSSIIIIIIIIHHHHHHHHHHIIIIIIIIGGGGQQQQQQQQQGGGGGGGGIIIIIIIIQQQQQQQQQVVVVVVVGGGGNNNNNNNNAAAAACCCCCCWWWWWWWWWWWWWWDDDDDDDDLLLLLLLLFFFFFFFFFFFCCCCCCLLLLLLLLEEEEEEEEEHHHHHHHHHHGGGGIIIIIIIIQQQQQQQQQPPPPPPPDDDDDDDDGGGGQQQQQQQQQMMMMMMMMPPPPPPPSSSSSSDDDDDDDDKKKKKKKKKTTTTTTTIIIIIIIIGGGGGGGGGGGGDDDDDDDDDDDDDDDDAAAAAFFFFFFFFFFFNNNNNNNNTTTTTTTFFFFFFFFFFFFFFFFFFFFFFSSSSSSEEEEEEEEETTTTTTTGGGGAAAAAGGGGKKKKKKKKKHHHHHHHHHHVVVVVVVPPPPPPPRRRRRRRRRRRAAAAAVVVVVVVFFFFFFFFFFFLLLLLLLLDDDDDDDDLLLLLLLLEEEEEEEEEPPPPPPPTTTTTTTVVVVVVVCCCCCCDDDDDDDDEEEEEEEEEVVVVVVVRRRRRRRRRRRTTTTTTTGGGGTTTTTTTYYYYYYYYYYYYRRRRRRRRRRRQQQQQQQQQLLLLLLLLFFFFFFFFFFFHHHHHHHHHHPPPPPPPEEEEEEEEEQQQQQQQQQLLLLLLLLIIIIIIIISSSSSSGGGGKKKKKKKKKEEEEEEEEEDDDDDDDDAAAAAAAAAANNNNNNNNNNNNNNNNFFFFFFFFFFFAAAAARRRRRRRRRRRGGGGHHHHHHHHHHYYYYYYYYYYYYTTTTTTTIIIIIIIIGGGGKKKKKKKKKEEEEEEEEEIIIIIIIIVVVVVVVDDDDDDDDLLLLLLLLCCCCCCLLLLLLLLDDDDDDDDRRRRRRRRRRRIIIIIIIIRRRRRRRRRRRKKKKKKKKKLLLLLLLLAAAAADDDDDDDDNNNNNNNNCCCCCCTTTTTTTGGGGLLLLLLLLQQQQQQQQQGGGGFFFFFFFFFFFIIIIIIIIGGGGFFFFFFFFFFFHHHHHHHHHHSSSSSSVVVVVVVGGGGGGGGGGGGTTTTTTTGGGGSSSSSSGGGGLLLLLLLLGGGGSSSSSSLLLLLLLLLLLLLLLLLLLLLLLLEEEEEEEEERRRRRRRRRRRLLLLLLLLSSSSSSVVVVVVVDDDDDDDDYYYYYYYYYYYYGGGGKKKKKKKKKKKKKKKKKKSSSSSSKKKKKKKKKLLLLLLLLTTTTTTTFFFFFFFFFFFTTTTTTTIIIIIIIIYYYYYYYYYYYYPPPPPPPSSSSSSPPPPPPPQQQQQQQQQVVVVVVVSSSSSSTTTTTTTAAAAAVVVVVVVVVVVVVVEEEEEEEEEPPPPPPPYYYYYYYYYYYYNNNNNNNNSSSSSSVVVVVVVLLLLLLLLSSSSSSTTTTTTTHHHHHHHHHHSSSSSSLLLLLLLLLLLLLLLLEEEEEEEEEHHHHHHHHHHTTTTTTTDDDDDDDDVVVVVVVAAAAAVVVVVVVMMMMMMMMLLLLLLLLDDDDDDDDNNNNNNNNEEEEEEEEEAAAAAVVVVVVVYYYYYYYYYYYYDDDDDDDDIIIIIIIICCCCCCRRRRRRRRRRRRRRRRRRRRRRNNNNNNNNLLLLLLLLDDDDDDDDIIIIIIIIEEEEEEEEERRRRRRRRRRRPPPPPPPTTTTTTTYYYYYYYYYYYYTTTTTTTNNNNNNNNLLLLLLLLNNNNNNNNRRRRRRRRRRRLLLLLLLLIIIIIIIIAAAAAQQQQQQQQQVVVVVVVIIIIIIIISSSSSSSSSSSSLLLLLLLLTTTTTTTAAAAASSSSSSLLLLLLLLRRRRRRRRRRRFFFFFFFFFFFDDDDDDDDGGGGAAAAALLLLLLLLNNNNNNNNVVVVVVVDDDDDDDDVVVVVVVTTTTTTTEEEEEEEEEFFFFFFFFFFFQQQQQQQQQTTTTTTTNNNNNNNNLLLLLLLLVVVVVVVPPPPPPPYYYYYYYYYYYYPPPPPPPRRRRRRRRRRRIIIIIIIIHHHHHHHHHHFFFFFFFFFFFMMMMMMMMLLLLLLLLSSSSSSSSSSSSYYYYYYYYYYYYAAAAAPPPPPPPVVVVVVVIIIIIIIISSSSSSAAAAAEEEEEEEEEKKKKKKKKKAAAAAYYYYYYYYYYYYHHHHHHHHHHEEEEEEEEEQQQQQQQQQLLLLLLLLSSSSSSVVVVVVVAAAAAEEEEEEEEEIIIIIIIITTTTTTTNNNNNNNNSSSSSSSSSSSSFFFFFFFFFFFEEEEEEEEEPPPPPPPAAAAASSSSSSMMMMMMMMMMMMMMMMAAAAAKKKKKKKKKCCCCCCDDDDDDDDPPPPPPPRRRRRRRRRRRHHHHHHHHHHGGGGKKKKKKKKKYYYYYYYYYYYYMMMMMMMMAAAAACCCCCCCCCCCCMMMMMMMMMMMMMMMMYYYYYYYYYYYYRRRRRRRRRRRGGGGDDDDDDDDVVVVVVVVVVVVVVPPPPPPPKKKKKKKKKDDDDDDDDVVVVVVVNNNNNNNNAAAAAAAAAAVVVVVVVAAAAATTTTTTTIIIIIIIIKKKKKKKKKTTTTTTTKKKKKKKKKRRRRRRRRRRRTTTTTTTIIIIIIIIQQQQQQQQQFFFFFFFFFFFVVVVVVVDDDDDDDDWWWWWWWWWWWWWWSSSSSSPPPPPPPTTTTTTTGGGGFFFFFFFFFFFKKKKKKKKKCCCCCCGGGGIIIIIIIINNNNNNNNYYYYYYYYYYYYQQQQQQQQQPPPPPPPPPPPPPPTTTTTTTVVVVVVVVVVVVVVPPPPPPPGGGGGGGGDDDDDDDDLLLLLLLLAAAAAKKKKKKKKKVVVVVVVMMMMMMMMRRRRRRRRRRRAAAAAVVVVVVVCCCCCCMMMMMMMMIIIIIIIISSSSSSNNNNNNNNSSSSSSTTTTTTTAAAAAIIIIIIIIAAAAAEEEEEEEEEVVVVVVVFFFFFFFFFFFSSSSSSRRRRRRRRRRRIIIIIIIIDDDDDDDDHHHHHHHHHHKKKKKKKKKFFFFFFFFFFFDDDDDDDDLLLLLLLLMMMMMMMMYYYYYYYYYYYYAAAAAKKKKKKKKKRRRRRRRRRRRAAAAAFFFFFFFFFFFVVVVVVVHHHHHHHHHHWWWWWWWWWWWWWWYYYYYYYYYYYYVVVVVVVGGGGEEEEEEEEEGGGGMMMMMMMMEEEEEEEEEEEEEEEEEEGGGGEEEEEEEEEFFFFFFFFFFFSSSSSSEEEEEEEEEAAAAARRRRRRRRRRREEEEEEEEEDDDDDDDDLLLLLLLLAAAAAAAAAALLLLLLLLEEEEEEEEEKKKKKKKKKDDDDDDDDYYYYYYYYYYYYEEEEEEEEEEEEEEEEEEVVVVVVVGGGGIIIIIIIIEEEEEEEEETTTTTTTAAAAAEEEEEEEEEGGGGEEEEEEEEEGGGGEEEEEEEEEEEEEEEEEEEEEEEEEEEGGGGMMMMMMMMEEEEEEEEEE

SEQ ID NO: 79 - protein, 3478 aa, Euplotes vannus
MMMMMMMMRRRRRRRRRRREEEEEEEEEVVVVVVVIIIIIIIISSSSSSVVVVVVVHHHHHHHHHHIIIIIIIIGGGGQQQQQQQQQGGGGGGGGIIIIIIIIQQQQQQQQQVVVVVVVGGGGNNNNNNNNAAAAACCCCCCWWWWWWWWWWWWWWEEEEEEEEELLLLLLLLFFFFFFFFFFFCCCCCCLLLLLLLLEEEEEEEEEHHHHHHHHHHGGGGIIIIIIIIQQQQQQQQQPPPPPPPDDDDDDDDGGGGQQQQQQQQQMMMMMMMMPPPPPPPSSSSSSDDDDDDDDKKKKKKKKKTTTTTTTIIIIIIIIGGGGGGGGGGGGDDDDDDDDDDDDDDDDAAAAAFFFFFFFFFFFNNNNNNNNTTTTTTTFFFFFFFFFFFFFFFFFFFFFFSSSSSSEEEEEEEEETTTTTTTGGGGAAAAAGGGGKKKKKKKKKHHHHHHHHHHVVVVVVVPPPPPPPRRRRRRRRRRRAAAAAVVVVVVVLLLLLLLLVVVVVVVDDDDDDDDLLLLLLLLEEEEEEEEEPPPPPPPTTTTTTTVVVVVVVCCCCCCDDDDDDDDEEEEEEEEEIIIIIIIIRRRRRRRRRRRTTTTTTTGGGGTTTTTTTYYYYYYYYYYYYRRRRRRRRRRRQQQQQQQQQLLLLLLLLFFFFFFFFFFFHHHHHHHHHHPPPPPPPEEEEEEEEEQQQQQQQQQIIIIIIIIIIIIIIIISSSSSSGGGGKKKKKKKKKEEEEEEEEEDDDDDDDDAAAAAAAAAANNNNNNNNNNNNNNNNFFFFFFFFFFFAAAAARRRRRRRRRRRGGGGHHHHHHHHHHYYYYYYYYYYYYTTTTTTTIIIIIIIIGGGGKKKKKKKKKEEEEEEEEEIIIIIIIIVVVVVVVDDDDDDDDLLLLLLLLVVVVVVVLLLLLLLLDDDDDDDDRRRRRRRRRRRIIIIIIIIRRRRRRRRRRRKKKKKKKKKLLLLLLLLAAAAADDDDDDDDNNNNNNNNCCCCCCTTTTTTTGGGGLLLLLLLLQQQQQQQQQGGGGFFFFFFFFFFFIIIIIIIIGGGGFFFFFFFFFFFHHHHHHHHHHSSSSSSVVVVVVVGGGGGGGGGGGGTTTTTTTGGGGSSSSSSGGGGLLLLLLLLGGGGSSSSSSLLLLLLLLLLLLLLLLLLLLLLLLEEEEEEEEERRRRRRRRRRRLLLLLLLLSSSSSSVVVVVVVDDDDDDDDYYYYYYYYYYYYGGGGKKKKKKKKKKKKKKKKKKSSSSSSKKKKKKKKKLLLLLLLLCCCCCCFFFFFFFFFFFTTTTTTTVVVVVVVYYYYYYYYYYYYPPPPPPPSSSSSSPPPPPPPQQQQQQQQQVVVVVVVSSSSSSTTTTTTTAAAAAVVVVVVVVVVVVVVEEEEEEEEEPPPPPPPYYYYYYYYYYYYNNNNNNNNSSSSSSVVVVVVVLLLLLLLLSSSSSSTTTTTTTHHHHHHHHHHSSSSSSLLLLLLLLLLLLLLLLEEEEEEEEEHHHHHHHHHHTTTTTTTDDDDDDDDVVVVVVVAAAAAVVVVVVVMMMMMMMMLLLLLLLLDDDDDDDDNNNNNNNNEEEEEEEEEAAAAAVVVVVVVYYYYYYYYYYYYDDDDDDDDIIIIIIIICCCCCCRRRRRRRRRRRRRRRRRRRRRRNNNNNNNNLLLLLLLLDDDDDDDDIIIIIIIIEEEEEEEEERRRRRRRRRRRPPPPPPPTTTTTTTYYYYYYYYYYYYTTTTTTTNNNNNNNNLLLLLLLLNNNNNNNNRRRRRRRRRRRLLLLLLLLIIIIIIIIAAAAAQQQQQQQQQVVVVVVVIIIIIIIISSSSSSSSSSSSLLLLLLLLTTTTTTTAAAAASSSSSSLLLLLLLLRRRRRRRRRRRFFFFFFFFFFFDDDDDDDDGGGGAAAAALLLLLLLLNNNNNNNNVVVVVVVDDDDDDDDIIIIIIIITTTTTTTEEEEEEEEEFFFFFFFFFFFQQQQQQQQQTTTTTTTNNNNNNNNLLLLLLLLVVVVVVVPPPPPPPYYYYYYYYYYYYPPPPPPPRRRRRRRRRRRIIIIIIIIHHHHHHHHHHFFFFFFFFFFFMMMMMMMMLLLLLLLLSSSSSSSSSSSSYYYYYYYYYYYYGGGGPPPPPPPVVVVVVVIIIIIIIISSSSSSAAAAAEEEEEEEEEKKKKKKKKKAAAAAYYYYYYYYYYYYHHHHHHHHHHEEEEEEEEEQQQQQQQQQLLLLLLLLSSSSSSVVVVVVVAAAAAEEEEEEEEEIIIIIIIITTTTTTTNNNNNNNNSSSSSSSSSSSSFFFFFFFFFFFEEEEEEEEEPPPPPPPAAAAASSSSSSMMMMMMMMMMMMMMMMAAAAAKKKKKKKKKCCCCCCDDDDDDDDPPPPPPPRRRRRRRRRRRHHHHHHHHHHGGGGKKKKKKKKKYYYYYYYYYYYYMMMMMMMMAAAAACCCCCCCCCCCCMMMMMMMMMMMMMMMMFFFFFFFFFFFRRRRRRRRRRRGGGGDDDDDDDDVVVVVVVVVVVVVVPPPPPPPKKKKKKKKKDDDDDDDDVVVVVVVNNNNNNNNAAAAAAAAAAVVVVVVVAAAAATTTTTTTIIIIIIIIKKKKKKKKKTTTTTTTKKKKKKKKKRRRRRRRRRRRTTTTTTTIIIIIIIIQQQQQQQQQFFFFFFFFFFFVVVVVVVDDDDDDDDWWWWWWWWWWWWWWSSSSSSPPPPPPPGGGGFFFFFFFFFFFKKKKKKKKKVVVVVVVGGGGIIIIIIIINNNNNNNNYYYYYYYYYYYYQQQQQQQQQPPPPPPPPPPPPPPTTTTTTTVVVVVVVVVVVVVVPPPPPPPGGGGGGGGDDDDDDDDLLLLLLLLAAAAAKKKKKKKKKVVVVVVVMMMMMMMMRRRRRRRRRRRAAAAAVVVVVVVCCCCCCMMMMMMMMIIIIIIIISSSSSSNNNNNNNNSSSSSSTTTTTTTAAAAAIIIIIIIIAAAAAEEEEEEEEEVVVVVVVFFFFFFFFFFFSSSSSSRRRRRRRRRRRIIIIIIIIDDDDDDDDHHHHHHHHHHKKKKKKKKKFFFFFFFFFFFDDDDDDDDLLLLLLLLMMMMMMMMYYYYYYYYYYYYAAAAAKKKKKKKKKRRRRRRRRRRRAAAAAFFFFFFFFFFFVVVVVVVHHHHHHHHHHWWWWWWWWWWWWWWYYYYYYYYYYYYVVVVVVVGGGGEEEEEEEEEGGGGMMMMMMMMEEEEEEEEEEEEEEEEEEGGGGEEEEEEEEEFFFFFFFFFFFSSSSSSEEEEEEEEEAAAAARRRRRRRRRRREEEEEEEEEDDDDDDDDLLLLLLLLAAAAAAAAAALLLLLLLLEEEEEEEEEKKKKKKKKKDDDDDDDDYYYYYYYYYYYYEEEEEEEEEEEEEEEEEEVVVVVVVGGGGIIIIIIIIEEEEEEEEETTTTTTTAAAAAEEEEEEEEEGGGGEEEEEEEEEGGGGEEEEEEEEEEEEEEEEEEEEEEEEEEEDDDDDDDDMMMMMMMMAAAAAQQQQQQQQQQ

SEQ ID NO: 80 - protein, 3522 aa, Haemonchus contortus
MMMMMMMMRRRRRRRRRRREEEEEEEEEVVVVVVVIIIIIIIISSSSSSIIIIIIIIHHHHHHHHHHIIIIIIIIGGGGQQQQQQQQQAAAAAGGGGVVVVVVVQQQQQQQQQIIIIIIIIGGGGNNNNNNNNAAAAACCCCCCWWWWWWWWWWWWWWEEEEEEEEELLLLLLLLYYYYYYYYYYYYCCCCCCLLLLLLLLEEEEEEEEEHHHHHHHHHHGGGGIIIIIIIIQQQQQQQQQPPPPPPPDDDDDDDDGGGGQQQQQQQQQMMMMMMMMPPPPPPPSSSSSSDDDDDDDDKKKKKKKKKSSSSSSLLLLLLLLGGGGGGGGCCCCCCDDDDDDDDDDDDDDDDSSSSSSFFFFFFFFFFFSSSSSSTTTTTTTFFFFFFFFFFFFFFFFFFFFFFSSSSSSEEEEEEEEETTTTTTTGGGGSSSSSSGGGGRRRRRRRRRRRHHHHHHHHHHVVVVVVVPPPPPPPRRRRRRRRRRRAAAAAVVVVVVVMMMMMMMMIIIIIIIIDDDDDDDDLLLLLLLLEEEEEEEEEPPPPPPPTTTTTTTVVVVVVVIIIIIIIIDDDDDDDDEEEEEEEEEIIIIIIIIRRRRRRRRRRRTTTTTTTGGGGTTTTTTTYYYYYYYYYYYYRRRRRRRRRRRSSSSSSLLLLLLLLFFFFFFFFFFFHHHHHHHHHHPPPPPPPEEEEEEEEEQQQQQQQQQLLLLLLLLIIIIIIIITTTTTTTGGGGKKKKKKKKKEEEEEEEEEDDDDDDDDAAAAAAAAAANNNNNNNNNNNNNNNNYYYYYYYYYYYYAAAAARRRRRRRRRRRGGGGHHHHHHHHHHYYYYYYYYYYYYTTTTTTTIIIIIIIIGGGGKKKKKKKKKEEEEEEEEEIIIIIIIIIIIIIIIIDDDDDDDDLLLLLLLLTTTTTTTLLLLLLLLDDDDDDDDRRRRRRRRRRRIIIIIIIIRRRRRRRRRRRRRRRRRRRRRRLLLLLLLLAAAAADDDDDDDDNNNNNNNNCCCCCCTTTTTTTGGGGLLLLLLLLQQQQQQQQQGGGGFFFFFFFFFFFLLLLLLLLVVVVVVVFFFFFFFFFFFHHHHHHHHHHSSSSSSFFFFFFFFFFFGGGGGGGGGGGGTTTTTTTGGGGSSSSSSGGGGFFFFFFFFFFFTTTTTTTSSSSSSLLLLLLLLLLLLLLLLMMMMMMMMEEEEEEEEERRRRRRRRRRRLLLLLLLLSSSSSSVVVVVVVDDDDDDDDYYYYYYYYYYYYGGGGKKKKKKKKKKKKKKKKKKAAAAAKKKKKKKKKLLLLLLLLEEEEEEEEEFFFFFFFFFFFSSSSSSVVVVVVVYYYYYYYYYYYYPPPPPPPAAAAAPPPPPPPQQQQQQQQQVVVVVVVSSSSSSTTTTTTTAAAAAVVVVVVVVVVVVVVEEEEEEEEEPPPPPPPYYYYYYYYYYYYNNNNNNNNSSSSSSIIIIIIIILLLLLLLLTTTTTTTTTTTTTTHHHHHHHHHHTTTTTTTTTTTTTTLLLLLLLLEEEEEEEEEHHHHHHHHHHSSSSSSDDDDDDDDCCCCCCSSSSSSFFFFFFFFFFFMMMMMMMMVVVVVVVDDDDDDDDNNNNNNNNEEEEEEEEEAAAAAIIIIIIIIYYYYYYYYYYYYDDDDDDDDIIIIIIIICCCCCCRRRRRRRRRRRRRRRRRRRRRRNNNNNNNNLLLLLLLLDDDDDDDDIIIIIIIIEEEEEEEEERRRRRRRRRRRPPPPPPPSSSSSSYYYYYYYYYYYYTTTTTTTNNNNNNNNLLLLLLLLNNNNNNNNRRRRRRRRRRRLLLLLLLLIIIIIIIIGGGGQQQQQQQQQIIIIIIIIVVVVVVVSSSSSSSSSSSSIIIIIIIITTTTTTTAAAAASSSSSSLLLLLLLLRRRRRRRRRRRFFFFFFFFFFFDDDDDDDDGGGGAAAAALLLLLLLLNNNNNNNNVVVVVVVDDDDDDDDLLLLLLLLTTTTTTTEEEEEEEEEFFFFFFFFFFFQQQQQQQQQTTTTTTTNNNNNNNNLLLLLLLLVVVVVVVPPPPPPPYYYYYYYYYYYYPPPPPPPRRRRRRRRRRRIIIIIIIIHHHHHHHHHHFFFFFFFFFFFPPPPPPPLLLLLLLLAAAAATTTTTTTFFFFFFFFFFFSSSSSSPPPPPPPVVVVVVVIIIIIIIISSSSSSAAAAAEEEEEEEEEKKKKKKKKKAAAAAYYYYYYYYYYYYHHHHHHHHHHEEEEEEEEEQQQQQQQQQLLLLLLLLSSSSSSVVVVVVVAAAAAEEEEEEEEEIIIIIIIITTTTTTTNNNNNNNNMMMMMMMMCCCCCCFFFFFFFFFFFEEEEEEEEEPPPPPPPHHHHHHHHHHNNNNNNNNQQQQQQQQQMMMMMMMMVVVVVVVKKKKKKKKKCCCCCCDDDDDDDDPPPPPPPRRRRRRRRRRRHHHHHHHHHHGGGGKKKKKKKKKYYYYYYYYYYYYMMMMMMMMAAAAAVVVVVVVCCCCCCLLLLLLLLLLLLLLLLFFFFFFFFFFFRRRRRRRRRRRGGGGDDDDDDDDVVVVVVVVVVVVVVPPPPPPPKKKKKKKKKDDDDDDDDVVVVVVVNNNNNNNNAAAAAAAAAAIIIIIIIIAAAAATTTTTTTIIIIIIIIKKKKKKKKKTTTTTTTKKKKKKKKKRRRRRRRRRRRSSSSSSIIIIIIIIQQQQQQQQQFFFFFFFFFFFVVVVVVVDDDDDDDDWWWWWWWWWWWWWWCCCCCCPPPPPPPTTTTTTTGGGGFFFFFFFFFFFKKKKKKKKKVVVVVVVGGGGIIIIIIIINNNNNNNNYYYYYYYYYYYYQQQQQQQQQPPPPPPPPPPPPPPTTTTTTTVVVVVVVVVVVVVVPPPPPPPGGGGGGGGDDDDDDDDLLLLLLLLAAAAAKKKKKKKKKVVVVVVVPPPPPPPRRRRRRRRRRRAAAAAVVVVVVVCCCCCCMMMMMMMMLLLLLLLLSSSSSSNNNNNNNNTTTTTTTTTTTTTTAAAAAIIIIIIIIAAAAAEEEEEEEEEAAAAAWWWWWWWWWWWWWWAAAAARRRRRRRRRRRLLLLLLLLDDDDDDDDHHHHHHHHHHKKKKKKKKKFFFFFFFFFFFDDDDDDDDLLLLLLLLMMMMMMMMYYYYYYYYYYYYAAAAAKKKKKKKKKRRRRRRRRRRRAAAAAFFFFFFFFFFFVVVVVVVHHHHHHHHHHWWWWWWWWWWWWWWYYYYYYYYYYYYVVVVVVVGGGGEEEEEEEEEGGGGMMMMMMMMEEEEEEEEEEEEEEEEEEGGGGEEEEEEEEEFFFFFFFFFFFSSSSSSEEEEEEEEEAAAAARRRRRRRRRRREEEEEEEEEDDDDDDDDLLLLLLLLAAAAAAAAAALLLLLLLLEEEEEEEEEKKKKKKKKKDDDDDDDDYYYYYYYYYYYYEEEEEEEEEEEEEEEEEEVVVVVVVGGGGVVVVVVVDDDDDDDDSSSSSSLLLLLLLLEEEEEEEEEDDDDDDDDNNNNNNNNGGGGEEEEEEEEEEEEEEEEEEGGGGDDDDDDDDEEEEEEEEEYYYYYYYYYYYYY

SEQ ID NO: 81 - protein, 188 aa, Leptomonas seymouri
MMMMMMMMRRRRRRRRRRREEEEEEEEEAAAAAIIIIIIIICCCCCCIIIIIIIIHHHHHHHHHHIIIIIIIIGGGGQQQQQQQQQAAAAAGGGGYYYYYYYYYYYYQQQQQQQQQIIIIIIIIGGGGNNNNNNNNAAAAACCCCCCSSSSSSQQQQQQQQQLLLLLLLLFFFFFFFFFFFCCCCCCC

SEQ ID NO: 82 - protein, 1262 aa, Lytechinus pictus
IIIIIIIITTTTTTTNNNNNNNNAAAAACCCCCCFFFFFFFFFFFEEEEEEEEEPPPPPPPAAAAANNNNNNNNQQQQQQQQQMMMMMMMMVVVVVVVKKKKKKKKKCCCCCCDDDDDDDDPPPPPPPRRRRRRRRRRRHHHHHHHHHHGGGGKKKKKKKKKYYYYYYYYYYYYMMMMMMMMAAAAACCCCCCCCCCCCMMMMMMMMLLLLLLLLYYYYYYYYYYYYRRRRRRRRRRRGGGGDDDDDDDDVVVVVVVVVVVVVVPPPPPPPKKKKKKKKKDDDDDDDDVVVVVVVNNNNNNNNAAAAAAAAAAIIIIIIIIAAAAATTTTTTTIIIIIIIIKKKKKKKKKTTTTTTTKKKKKKKKKRRRRRRRRRRRTTTTTTTIIIIIIIIQQQQQQQQQFFFFFFFFFFFVVVVVVVDDDDDDDDWWWWWWWWWWWWWWCCCCCCPPPPPPPTTTTTTTGGGGFFFFFFFFFFFKKKKKKKKKVVVVVVVGGGGIIIIIIIINNNNNNNNYYYYYYYYYYYYQQQQQQQQQPPPPPPPPPPPPPPTTTTTTTVVVVVVVVVVVVVVPPPPPPPGGGGGGGGDDDDDDDDLLLLLLLLAAAAAKKKKKKKKKVVVVVVVQQQQQQQQQRRRRRRRRRRRAAAAAVVVVVVVCCCCCCMMMMMMMMLLLLLLLLSSSSSSNNNNNNNNTTTTTTTTTTTTTTAAAAAIIIIIIIIAAAAAEEEEEEEEEAAAAAWWWWWWWWWWWWWWAAAAARRRRRRRRRRRLLLLLLLLDDDDDDDDHHHHHHHHHHKKKKKKKKKFFFFFFFFFFFDDDDDDDDLLLLLLLLMMMMMMMMYYYYYYYYYYYYAAAAAKKKKKKKKKRRRRRRRRRRRAAAAAFFFFFFFFFFFVVVVVVVHHHHHHHHHHWWWWWWWWWWWWWWYYYYYYYYYYYYVVVVVVVGGGGEEEEEEEEEGGGGMMMMMMMMEEEEEEEEEEEEEEEEEEGGGGEEEEEEEEEFFFFFFFFFFFSSSSSSEEEEEEEEEAAAAARRRRRRRRRRREEEEEEEEEDDDDDDDDLLLLLLLLAAAAAAAAAALLLLLLLLEEEEEEEEEKKKKKKKKKDDDDDDDDYYYYYYYYYYYYEEEEEEEEEEEEEEEEEEVVVVVVVGGGGVVVVVVVDDDDDDDDSSSSSSVVVVVVVEEEEEEEEEGGGGEEEEEEEEEAAAAAEEEEEEEEEEEEEEEEEEEEEEEEEEEGGGGEEEEEEEEEEEEEEEEEEYYYYYYYYYYYYY

SEQ ID NO: 83 - protein, 3512 aa, Mycosphaerella graminicola
MMMMMMMMRRRRRRRRRRREEEEEEEEEVVVVVVVIIIIIIIISSSSSSLLLLLLLLNNNNNNNNVVVVVVVGGGGQQQQQQQQQAAAAAGGGGCCCCCCQQQQQQQQQIIIIIIIIAAAAANNNNNNNNSSSSSSCCCCCCWWWWWWWWWWWWWWEEEEEEEEELLLLLLLLYYYYYYYYYYYYCCCCCCLLLLLLLLEEEEEEEEEHHHHHHHHHHGGGGIIIIIIIIQQQQQQQQQPPPPPPPDDDDDDDDGGGGYYYYYYYYYYYYLLLLLLLLTTTTTTTEEEEEEEEEEEEEEEEEERRRRRRRRRRRKKKKKKKKKAAAAAAAAAAEEEEEEEEEDDDDDDDDDDDDDDDDDDDDDDDDGGGGFFFFFFFFFFFSSSSSSTTTTTTTFFFFFFFFFFFFFFFFFFFFFFSSSSSSEEEEEEEEETTTTTTTGGGGNNNNNNNNGGGGKKKKKKKKKYYYYYYYYYYYYVVVVVVVPPPPPPPRRRRRRRRRRRTTTTTTTIIIIIIIIYYYYYYYYYYYYAAAAADDDDDDDDLLLLLLLLEEEEEEEEEPPPPPPPNNNNNNNNVVVVVVVVVVVVVVDDDDDDDDEEEEEEEEEVVVVVVVRRRRRRRRRRRTTTTTTTGGGGTTTTTTTYYYYYYYYYYYYRRRRRRRRRRRSSSSSSLLLLLLLLFFFFFFFFFFFHHHHHHHHHHPPPPPPPEEEEEEEEELLLLLLLLMMMMMMMMIIIIIIIITTTTTTTGGGGKKKKKKKKKEEEEEEEEEDDDDDDDDAAAAASSSSSSNNNNNNNNNNNNNNNNYYYYYYYYYYYYAAAAARRRRRRRRRRRGGGGHHHHHHHHHHYYYYYYYYYYYYTTTTTTTVVVVVVVGGGGKKKKKKKKKEEEEEEEEELLLLLLLLIIIIIIIIDDDDDDDDQQQQQQQQQVVVVVVVLLLLLLLLDDDDDDDDKKKKKKKKKVVVVVVVRRRRRRRRRRRHHHHHHHHHHVVVVVVVAAAAADDDDDDDDNNNNNNNNCCCCCCSSSSSSGGGGLLLLLLLLQQQQQQQQQGGGGFFFFFFFFFFFLLLLLLLLVVVVVVVFFFFFFFFFFFHHHHHHHHHHSSSSSSFFFFFFFFFFFGGGGGGGGGGGGTTTTTTTGGGGSSSSSSGGGGFFFFFFFFFFFGGGGAAAAALLLLLLLLLLLLLLLLMMMMMMMMEEEEEEEEERRRRRRRRRRRLLLLLLLLSSSSSSVVVVVVVDDDDDDDDYYYYYYYYYYYYGGGGKKKKKKKKKKKKKKKKKKCCCCCCKKKKKKKKKLLLLLLLLEEEEEEEEEFFFFFFFFFFFCCCCCCVVVVVVVYYYYYYYYYYYYPPPPPPPAAAAAPPPPPPPQQQQQQQQQVVVVVVVAAAAATTTTTTTSSSSSSVVVVVVVVVVVVVVEEEEEEEEEPPPPPPPYYYYYYYYYYYYNNNNNNNNSSSSSSIIIIIIIILLLLLLLLTTTTTTTTTTTTTTHHHHHHHHHHTTTTTTTTTTTTTTLLLLLLLLEEEEEEEEEHHHHHHHHHHSSSSSSDDDDDDDDCCCCCCSSSSSSFFFFFFFFFFFMMMMMMMMVVVVVVVDDDDDDDDNNNNNNNNEEEEEEEEEAAAAAIIIIIIIIYYYYYYYYYYYYDDDDDDDDIIIIIIIICCCCCCRRRRRRRRRRRRRRRRRRRRRRNNNNNNNNLLLLLLLLGGGGIIIIIIIIEEEEEEEEERRRRRRRRRRRPPPPPPPNNNNNNNNYYYYYYYYYYYYEEEEEEEEENNNNNNNNLLLLLLLLNNNNNNNNRRRRRRRRRRRLLLLLLLLIIIIIIIIAAAAAQQQQQQQQQVVVVVVVVVVVVVVSSSSSSSSSSSSIIIIIIIITTTTTTTAAAAASSSSSSLLLLLLLLRRRRRRRRRRRFFFFFFFFFFFDDDDDDDDGGGGSSSSSSLLLLLLLLNNNNNNNNVVVVVVVDDDDDDDDLLLLLLLLNNNNNNNNEEEEEEEEEFFFFFFFFFFFQQQQQQQQQTTTTTTTNNNNNNNNLLLLLLLLVVVVVVVPPPPPPPYYYYYYYYYYYYPPPPPPPRRRRRRRRRRRIIIIIIIIHHHHHHHHHHFFFFFFFFFFFPPPPPPPLLLLLLLLVVVVVVVAAAAAYYYYYYYYYYYYAAAAAPPPPPPPIIIIIIIIVVVVVVVSSSSSSAAAAAAAAAAKKKKKKKKKAAAAAAAAAAHHHHHHHHHHEEEEEEEEEAAAAANNNNNNNNSSSSSSVVVVVVVQQQQQQQQQEEEEEEEEEIIIIIIIISSSSSSMMMMMMMMSSSSSSCCCCCCFFFFFFFFFFFEEEEEEEEEPPPPPPPNNNNNNNNSSSSSSQQQQQQQQQMMMMMMMMVVVVVVVKKKKKKKKKCCCCCCDDDDDDDDPPPPPPPRRRRRRRRRRRNNNNNNNNGGGGKKKKKKKKKYYYYYYYYYYYYMMMMMMMMAAAAATTTTTTTCCCCCCLLLLLLLLLLLLLLLLYYYYYYYYYYYYRRRRRRRRRRRGGGGDDDDDDDDVVVVVVVVVVVVVVPPPPPPPKKKKKKKKKDDDDDDDDVVVVVVVHHHHHHHHHHQQQQQQQQQAAAAAVVVVVVVAAAAATTTTTTTLLLLLLLLKKKKKKKKKTTTTTTTKKKKKKKKKRRRRRRRRRRRTTTTTTTIIIIIIIIQQQQQQQQQFFFFFFFFFFFVVVVVVVDDDDDDDDWWWWWWWWWWWWWWCCCCCCPPPPPPPTTTTTTTGGGGFFFFFFFFFFFKKKKKKKKKIIIIIIIIGGGGIIIIIIIICCCCCCYYYYYYYYYYYYQQQQQQQQQPPPPPPPPPPPPPPQQQQQQQQQNNNNNNNNVVVVVVVPPPPPPPNNNNNNNNGGGGDDDDDDDDLLLLLLLLAAAAAKKKKKKKKKVVVVVVVNNNNNNNNRRRRRRRRRRRAAAAAVVVVVVVCCCCCCMMMMMMMMLLLLLLLLSSSSSSNNNNNNNNTTTTTTTTTTTTTTAAAAAIIIIIIIIAAAAAEEEEEEEEEAAAAAWWWWWWWWWWWWWWSSSSSSAAAAALLLLLLLLSSSSSSHHHHHHHHHHKKKKKKKKKFFFFFFFFFFFDDDDDDDDLLLLLLLLMMMMMMMMYYYYYYYYYYYYSSSSSSKKKKKKKKKRRRRRRRRRRRAAAAAFFFFFFFFFFFVVVVVVVHHHHHHHHHHWWWWWWWWWWWWWWYYYYYYYYYYYYVVVVVVVGGGGEEEEEEEEEGGGGMMMMMMMMEEEEEEEEEEEEEEEEEEGGGGEEEEEEEEEFFFFFFFFFFFSSSSSSEEEEEEEEEAAAAARRRRRRRRRRREEEEEEEEEDDDDDDDDLLLLLLLLAAAAAAAAAALLLLLLLLEEEEEEEEERRRRRRRRRRRDDDDDDDDYYYYYYYYYYYYEEEEEEEEEEEEEEEEEEVVVVVVVAAAAAAAAAADDDDDDDDSSSSSSAAAAAEEEEEEEEEGGGGDDDDDDDDEEEEEEEEEGGGGGGGGEEEEEEEEEAAAAAEEEEEEEEEYYYYYYYYYYYYY

SEQ ID NO: 84 - protein, 3500 aa, Naegleria gruberi
MMMMMMMMRRRRRRRRRRREEEEEEEEEVVVVVVVIIIIIIIISSSSSSIIIIIIIIHHHHHHHHHHIIIIIIIIGGGGQQQQQQQQQAAAAAGGGGVVVVVVVQQQQQQQQQVVVVVVVGGGGNNNNNNNNAAAAACCCCCCWWWWWWWWWWWWWWEEEEEEEEELLLLLLLLYYYYYYYYYYYYCCCCCCLLLLLLLLEEEEEEEEEHHHHHHHHHHGGGGIIIIIIIIQQQQQQQQQPPPPPPPDDDDDDDDGGGGLLLLLLLLMMMMMMMMPPPPPPPSSSSSSDDDDDDDDKKKKKKKKKTTTTTTTIIIIIIIIGGGGVVVVVVVEEEEEEEEEDDDDDDDDDDDDDDDDAAAAAFFFFFFFFFFFNNNNNNNNTTTTTTTFFFFFFFFFFFFFFFFFFFFFFSSSSSSEEEEEEEEETTTTTTTGGGGAAAAAGGGGKKKKKKKKKHHHHHHHHHHVVVVVVVPPPPPPPRRRRRRRRRRRAAAAAVVVVVVVFFFFFFFFFFFLLLLLLLLDDDDDDDDLLLLLLLLEEEEEEEEEPPPPPPPTTTTTTTVVVVVVVVVVVVVVDDDDDDDDEEEEEEEEEVVVVVVVRRRRRRRRRRRTTTTTTTGGGGTTTTTTTYYYYYYYYYYYYRRRRRRRRRRRQQQQQQQQQLLLLLLLLFFFFFFFFFFFHHHHHHHHHHPPPPPPPEEEEEEEEEQQQQQQQQQLLLLLLLLIIIIIIIITTTTTTTGGGGKKKKKKKKKEEEEEEEEEDDDDDDDDAAAAAAAAAANNNNNNNNNNNNNNNNYYYYYYYYYYYYAAAAARRRRRRRRRRRGGGGHHHHHHHHHHYYYYYYYYYYYYTTTTTTTIIIIIIIIGGGGKKKKKKKKKEEEEEEEEEIIIIIIIIVVVVVVVDDDDDDDDLLLLLLLLCCCCCCLLLLLLLLDDDDDDDDRRRRRRRRRRRIIIIIIIIRRRRRRRRRRRKKKKKKKKKLLLLLLLLAAAAADDDDDDDDNNNNNNNNCCCCCCTTTTTTTGGGGLLLLLLLLQQQQQQQQQGGGGFFFFFFFFFFFLLLLLLLLVVVVVVVFFFFFFFFFFFSSSSSSSSSSSSVVVVVVVGGGGGGGGGGGGTTTTTTTGGGGSSSSSSGGGGLLLLLLLLGGGGAAAAALLLLLLLLLLLLLLLLLLLLLLLLEEEEEEEEERRRRRRRRRRRLLLLLLLLSSSSSSVVVVVVVDDDDDDDDYYYYYYYYYYYYGGGGKKKKKKKKKKKKKKKKKKSSSSSSKKKKKKKKKLLLLLLLLGGGGFFFFFFFFFFFTTTTTTTVVVVVVVYYYYYYYYYYYYPPPPPPPSSSSSSPPPPPPPQQQQQQQQQVVVVVVVAAAAATTTTTTTAAAAAVVVVVVVVVVVVVVEEEEEEEEEPPPPPPPYYYYYYYYYYYYNNNNNNNNSSSSSSVVVVVVVLLLLLLLLSSSSSSTTTTTTTHHHHHHHHHHAAAAALLLLLLLLLLLLLLLLEEEEEEEEEHHHHHHHHHHTTTTTTTDDDDDDDDVVVVVVVAAAAAVVVVVVVMMMMMMMMLLLLLLLLDDDDDDDDNNNNNNNNEEEEEEEEEAAAAAIIIIIIIIYYYYYYYYYYYYDDDDDDDDIIIIIIIICCCCCCRRRRRRRRRRRRRRRRRRRRRRSSSSSSLLLLLLLLDDDDDDDDIIIIIIIIQQQQQQQQQRRRRRRRRRRRPPPPPPPTTTTTTTYYYYYYYYYYYYTTTTTTTNNNNNNNNLLLLLLLLNNNNNNNNRRRRRRRRRRRLLLLLLLLIIIIIIIIAAAAAQQQQQQQQQVVVVVVVIIIIIIIISSSSSSSSSSSSLLLLLLLLTTTTTTTAAAAASSSSSSLLLLLLLLRRRRRRRRRRRFFFFFFFFFFFDDDDDDDDGGGGAAAAALLLLLLLLNNNNNNNNVVVVVVVDDDDDDDDVVVVVVVTTTTTTTEEEEEEEEEFFFFFFFFFFFQQQQQQQQQTTTTTTTNNNNNNNNLLLLLLLLVVVVVVVPPPPPPPYYYYYYYYYYYYPPPPPPPRRRRRRRRRRRIIIIIIIIHHHHHHHHHHFFFFFFFFFFFMMMMMMMMLLLLLLLLCCCCCCSSSSSSYYYYYYYYYYYYAAAAAPPPPPPPVVVVVVVIIIIIIIISSSSSSAAAAAEEEEEEEEEKKKKKKKKKAAAAAYYYYYYYYYYYYHHHHHHHHHHEEEEEEEEEQQQQQQQQQLLLLLLLLSSSSSSVVVVVVVAAAAAEEEEEEEEEIIIIIIIITTTTTTTNNNNNNNNSSSSSSAAAAAFFFFFFFFFFFEEEEEEEEEPPPPPPPAAAAASSSSSSMMMMMMMMMMMMMMMMAAAAAKKKKKKKKKCCCCCCDDDDDDDDPPPPPPPRRRRRRRRRRRHHHHHHHHHHGGGGKKKKKKKKKYYYYYYYYYYYYMMMMMMMMAAAAACCCCCCCCCCCCLLLLLLLLMMMMMMMMYYYYYYYYYYYYRRRRRRRRRRRGGGGDDDDDDDDVVVVVVVVVVVVVVPPPPPPPKKKKKKKKKDDDDDDDDVVVVVVVNNNNNNNNAAAAAAAAAAVVVVVVVAAAAATTTTTTTIIIIIIIIKKKKKKKKKTTTTTTTKKKKKKKKKRRRRRRRRRRRTTTTTTTIIIIIIIIQQQQQQQQQFFFFFFFFFFFVVVVVVVDDDDDDDDWWWWWWWWWWWWWWSSSSSSPPPPPPPTTTTTTTGGGGFFFFFFFFFFFKKKKKKKKKCCCCCCGGGGIIIIIIIINNNNNNNNYYYYYYYYYYYYQQQQQQQQQPPPPPPPPPPPPPPTTTTTTTVVVVVVVVVVVVVVPPPPPPPGGGGGGGGDDDDDDDDLLLLLLLLAAAAAKKKKKKKKKVVVVVVVQQQQQQQQQRRRRRRRRRRRAAAAAVVVVVVVCCCCCCMMMMMMMMIIIIIIIISSSSSSNNNNNNNNSSSSSSTTTTTTTAAAAAIIIIIIIIAAAAAEEEEEEEEEVVVVVVVFFFFFFFFFFFSSSSSSRRRRRRRRRRRIIIIIIIIDDDDDDDDHHHHHHHHHHKKKKKKKKKFFFFFFFFFFFDDDDDDDDLLLLLLLLMMMMMMMMYYYYYYYYYYYYAAAAAKKKKKKKKKRRRRRRRRRRRAAAAAFFFFFFFFFFFVVVVVVVHHHHHHHHHHWWWWWWWWWWWWWWYYYYYYYYYYYYVVVVVVVGGGGEEEEEEEEEGGGGMMMMMMMMEEEEEEEEEEEEEEEEEEGGGGEEEEEEEEEFFFFFFFFFFFSSSSSSEEEEEEEEEAAAAARRRRRRRRRRREEEEEEEEEDDDDDDDDLLLLLLLLAAAAAAAAAALLLLLLLLEEEEEEEEEKKKKKKKKKDDDDDDDDYYYYYYYYYYYYEEEEEEEEEEEEEEEEEEVVVVVVVGGGGTTTTTTTEEEEEEEEESSSSSSQQQQQQQQQEEEEEEEEEGGGGDDDDDDDDGGGGEEEEEEEEEEEEEEEEEEGGGGEEEEEEEEEDDDDDDDDGGGGGGGGDDDDDDDDQQQQQQQQQQ

SEQ ID NO: 85 - protein, 3519 aa, Notophthalmus viridescens
MMMMMMMMRRRRRRRRRRREEEEEEEEECCCCCCIIIIIIIISSSSSSVVVVVVVHHHHHHHHHHVVVVVVVGGGGQQQQQQQQQAAAAAGGGGVVVVVVVQQQQQQQQQMMMMMMMMGGGGNNNNNNNNAAAAACCCCCCWWWWWWWWWWWWWWEEEEEEEEELLLLLLLLYYYYYYYYYYYYCCCCCCLLLLLLLLEEEEEEEEEHHHHHHHHHHGGGGIIIIIIIIQQQQQQQQQPPPPPPPDDDDDDDDGGGGQQQQQQQQQMMMMMMMMPPPPPPPSSSSSSDDDDDDDDKKKKKKKKKTTTTTTTIIIIIIIIGGGGGGGGGGGGDDDDDDDDDDDDDDDDSSSSSSFFFFFFFFFFFNNNNNNNNTTTTTTTFFFFFFFFFFFFFFFFFFFFFFSSSSSSEEEEEEEEETTTTTTTGGGGAAAAAGGGGKKKKKKKKKHHHHHHHHHHVVVVVVVPPPPPPPRRRRRRRRRRRAAAAAIIIIIIIIFFFFFFFFFFFVVVVVVVDDDDDDDDLLLLLLLLEEEEEEEEEPPPPPPPSSSSSSVVVVVVVIIIIIIIIDDDDDDDDEEEEEEEEEVVVVVVVRRRRRRRRRRRTTTTTTTGGGGTTTTTTTYYYYYYYYYYYYRRRRRRRRRRRQQQQQQQQQLLLLLLLLFFFFFFFFFFFHHHHHHHHHHPPPPPPPEEEEEEEEEQQQQQQQQQLLLLLLLLIIIIIIIISSSSSSGGGGKKKKKKKKKEEEEEEEEEDDDDDDDDAAAAAAAAAANNNNNNNNNNNNNNNNYYYYYYYYYYYYAAAAARRRRRRRRRRRGGGGHHHHHHHHHHYYYYYYYYYYYYTTTTTTTIIIIIIIIGGGGKKKKKKKKKEEEEEEEEEIIIIIIIIIIIIIIIIDDDDDDDDQQQQQQQQQVVVVVVVLLLLLLLLDDDDDDDDRRRRRRRRRRRMMMMMMMMRRRRRRRRRRRKKKKKKKKKLLLLLLLLAAAAADDDDDDDDQQQQQQQQQCCCCCCTTTTTTTGGGGLLLLLLLLQQQQQQQQQGGGGFFFFFFFFFFFLLLLLLLLVVVVVVVFFFFFFFFFFFHHHHHHHHHHSSSSSSFFFFFFFFFFFGGGGGGGGGGGGTTTTTTTGGGGSSSSSSGGGGFFFFFFFFFFFTTTTTTTSSSSSSLLLLLLLLLLLLLLLLMMMMMMMMEEEEEEEEERRRRRRRRRRRLLLLLLLLSSSSSSVVVVVVVDDDDDDDDYYYYYYYYYYYYGGGGKKKKKKKKKKKKKKKKKKSSSSSSKKKKKKKKKLLLLLLLLEEEEEEEEEFFFFFFFFFFFAAAAAIIIIIIIIYYYYYYYYYYYYPPPPPPPAAAAAPPPPPPPQQQQQQQQQVVVVVVVSSSSSSTTTTTTTAAAAAVVVVVVVVVVVVVVEEEEEEEEEPPPPPPPYYYYYYYYYYYYNNNNNNNNSSSSSSIIIIIIIILLLLLLLLTTTTTTTTTTTTTTHHHHHHHHHHTTTTTTTTTTTTTTLLLLLLLLEEEEEEEEEHHHHHHHHHHSSSSSSDDDDDDDDCCCCCCAAAAAFFFFFFFFFFFMMMMMMMMVVVVVVVDDDDDDDDNNNNNNNNEEEEEEEEEAAAAAIIIIIIIIYYYYYYYYYYYYDDDDDDDDIIIIIIIICCCCCCRRRRRRRRRRRRRRRRRRRRRRNNNNNNNNLLLLLLLLDDDDDDDDIIIIIIIIEEEEEEEEERRRRRRRRRRRPPPPPPPSSSSSSYYYYYYYYYYYYTTTTTTTNNNNNNNNLLLLLLLLNNNNNNNNRRRRRRRRRRRLLLLLLLLIIIIIIIISSSSSSQQQQQQQQQIIIIIIIIVVVVVVVSSSSSSSSSSSSIIIIIIIITTTTTTTAAAAASSSSSSLLLLLLLLRRRRRRRRRRRFFFFFFFFFFFDDDDDDDDGGGGAAAAALLLLLLLLNNNNNNNNVVVVVVVDDDDDDDDLLLLLLLLTTTTTTTEEEEEEEEEFFFFFFFFFFFQQQQQQQQQTTTTTTTNNNNNNNNLLLLLLLLVVVVVVVPPPPPPPYYYYYYYYYYYYPPPPPPPRRRRRRRRRRRIIIIIIIIHHHHHHHHHHFFFFFFFFFFFPPPPPPPLLLLLLLLAAAAATTTTTTTYYYYYYYYYYYYAAAAAPPPPPPPVVVVVVVIIIIIIIISSSSSSAAAAAEEEEEEEEEKKKKKKKKKAAAAAYYYYYYYYYYYYHHHHHHHHHHEEEEEEEEEQQQQQQQQQLLLLLLLLSSSSSSVVVVVVVAAAAAEEEEEEEEEIIIIIIIITTTTTTTNNNNNNNNAAAAACCCCCCFFFFFFFFFFFEEEEEEEEEPPPPPPPAAAAANNNNNNNNQQQQQQQQQMMMMMMMMVVVVVVVKKKKKKKKKCCCCCCDDDDDDDDPPPPPPPRRRRRRRRRRRHHHHHHHHHHGGGGKKKKKKKKKYYYYYYYYYYYYMMMMMMMMAAAAACCCCCCCCCCCCLLLLLLLLLLLLLLLLYYYYYYYYYYYYRRRRRRRRRRRGGGGDDDDDDDDVVVVVVVVVVVVVVPPPPPPPKKKKKKKKKDDDDDDDDVVVVVVVNNNNNNNNAAAAAAAAAAIIIIIIIIAAAAAAAAAAIIIIIIIIKKKKKKKKKTTTTTTTKKKKKKKKKRRRRRRRRRRRSSSSSSIIIIIIIIQQQQQQQQQFFFFFFFFFFFVVVVVVVDDDDDDDDWWWWWWWWWWWWWWCCCCCCPPPPPPPTTTTTTTGGGGFFFFFFFFFFFKKKKKKKKKVVVVVVVGGGGIIIIIIIINNNNNNNNYYYYYYYYYYYYQQQQQQQQQPPPPPPPPPPPPPPTTTTTTTAAAAAVVVVVVVPPPPPPPGGGGGGGGDDDDDDDDLLLLLLLLAAAAAKKKKKKKKKVVVVVVVQQQQQQQQQRRRRRRRRRRRAAAAAVVVVVVVCCCCCCMMMMMMMMLLLLLLLLSSSSSSNNNNNNNNTTTTTTTTTTTTTTAAAAAIIIIIIIIAAAAAEEEEEEEEEAAAAAWWWWWWWWWWWWWWAAAAARRRRRRRRRRRLLLLLLLLDDDDDDDDHHHHHHHHHHKKKKKKKKKFFFFFFFFFFFDDDDDDDDLLLLLLLLMMMMMMMMYYYYYYYYYYYYAAAAAKKKKKKKKKRRRRRRRRRRRAAAAAFFFFFFFFFFFVVVVVVVHHHHHHHHHHWWWWWWWWWWWWWWYYYYYYYYYYYYVVVVVVVGGGGEEEEEEEEEGGGGMMMMMMMMEEEEEEEEEEEEEEEEEEGGGGEEEEEEEEEFFFFFFFFFFFSSSSSSEEEEEEEEEAAAAARRRRRRRRRRREEEEEEEEEDDDDDDDDMMMMMMMMAAAAAAAAAALLLLLLLLEEEEEEEEEKKKKKKKKKDDDDDDDDYYYYYYYYYYYYEEEEEEEEEEEEEEEEEEVVVVVVVGGGGLLLLLLLLDDDDDDDDSSSSSSYYYYYYYYYYYYEEEEEEEEEGGGGEEEEEEEEEEEEEEEEEEDDDDDDDDEEEEEEEEEGGGGEEEEEEEEEEEEEEEEEEYYYYYYYYYYYYY

SEQ ID NO: 86 - protein, 3481 aa, Physarum polycephalum
MMMMMMMMRRRRRRRRRRREEEEEEEEEIIIIIIIIIIIIIIIISSSSSSIIIIIIIIHHHHHHHHHHIIIIIIIIGGGGQQQQQQQQQAAAAAGGGGAAAAAQQQQQQQQQVVVVVVVGGGGNNNNNNNNAAAAACCCCCCWWWWWWWWWWWWWWEEEEEEEEELLLLLLLLYYYYYYYYYYYYCCCCCCLLLLLLLLEEEEEEEEEHHHHHHHHHHGGGGIIIIIIIINNNNNNNNPPPPPPPDDDDDDDDGGGGQQQQQQQQQMMMMMMMMPPPPPPPSSSSSSDDDDDDDDKKKKKKKKKSSSSSSVVVVVVVGGGGGGGGGGGGDDDDDDDDDDDDDDDDAAAAAFFFFFFFFFFFNNNNNNNNTTTTTTTFFFFFFFFFFFFFFFFFFFFFFSSSSSSEEEEEEEEETTTTTTTSSSSSSSSSSSSGGGGKKKKKKKKKHHHHHHHHHHVVVVVVVPPPPPPPRRRRRRRRRRRAAAAAIIIIIIIIYYYYYYYYYYYYLLLLLLLLDDDDDDDDLLLLLLLLEEEEEEEEEPPPPPPPTTTTTTTVVVVVVVIIIIIIIIDDDDDDDDEEEEEEEEEIIIIIIIIRRRRRRRRRRRTTTTTTTGGGGTTTTTTTYYYYYYYYYYYYRRRRRRRRRRRQQQQQQQQQLLLLLLLLFFFFFFFFFFFHHHHHHHHHHPPPPPPPEEEEEEEEEQQQQQQQQQLLLLLLLLIIIIIIIITTTTTTTGGGGKKKKKKKKKEEEEEEEEEDDDDDDDDAAAAAAAAAANNNNNNNNNNNNNNNNYYYYYYYYYYYYAAAAARRRRRRRRRRRGGGGHHHHHHHHHHYYYYYYYYYYYYTTTTTTTVVVVVVVGGGGKKKKKKKKKEEEEEEEEEIIIIIIIIVVVVVVVDDDDDDDDLLLLLLLLCCCCCCLLLLLLLLDDDDDDDDRRRRRRRRRRRVVVVVVVRRRRRRRRRRRKKKKKKKKKLLLLLLLLAAAAADDDDDDDDQQQQQQQQQCCCCCCSSSSSSGGGGLLLLLLLLQQQQQQQQQGGGGFFFFFFFFFFFLLLLLLLLVVVVVVVFFFFFFFFFFFHHHHHHHHHHSSSSSSVVVVVVVGGGGGGGGGGGGTTTTTTTGGGGSSSSSSGGGGFFFFFFFFFFFGGGGSSSSSSLLLLLLLLLLLLLLLLLLLLLLLLEEEEEEEEERRRRRRRRRRRLLLLLLLLSSSSSSVVVVVVVDDDDDDDDYYYYYYYYYYYYGGGGKKKKKKKKKKKKKKKKKKSSSSSSKKKKKKKKKLLLLLLLLDDDDDDDDFFFFFFFFFFFCCCCCCVVVVVVVYYYYYYYYYYYYPPPPPPPSSSSSSPPPPPPPQQQQQQQQQVVVVVVVSSSSSSTTTTTTTAAAAAVVVVVVVVVVVVVVEEEEEEEEEPPPPPPPYYYYYYYYYYYYNNNNNNNNSSSSSSVVVVVVVLLLLLLLLSSSSSSTTTTTTTHHHHHHHHHHGGGGLLLLLLLLLLLLLLLLEEEEEEEEEHHHHHHHHHHTTTTTTTDDDDDDDDVVVVVVVAAAAAFFFFFFFFFFFMMMMMMMMLLLLLLLLDDDDDDDDNNNNNNNNEEEEEEEEEAAAAAIIIIIIIIYYYYYYYYYYYYDDDDDDDDLLLLLLLLCCCCCCKKKKKKKKKKKKKKKKKKSSSSSSLLLLLLLLDDDDDDDDIIIIIIIIDDDDDDDDRRRRRRRRRRRPPPPPPPSSSSSSYYYYYYYYYYYYAAAAANNNNNNNNLLLLLLLLNNNNNNNNRRRRRRRRRRRLLLLLLLLVVVVVVVAAAAAQQQQQQQQQVVVVVVVIIIIIIIISSSSSSSSSSSSLLLLLLLLTTTTTTTTTTTTTTSSSSSSLLLLLLLLRRRRRRRRRRRFFFFFFFFFFFDDDDDDDDGGGGAAAAALLLLLLLLNNNNNNNNVVVVVVVDDDDDDDDIIIIIIIINNNNNNNNEEEEEEEEEFFFFFFFFFFFQQQQQQQQQTTTTTTTNNNNNNNNLLLLLLLLVVVVVVVPPPPPPPYYYYYYYYYYYYPPPPPPPRRRRRRRRRRRIIIIIIIIHHHHHHHHHHFFFFFFFFFFFMMMMMMMMLLLLLLLLAAAAASSSSSSYYYYYYYYYYYYAAAAAPPPPPPPVVVVVVVIIIIIIIISSSSSSAAAAAEEEEEEEEEKKKKKKKKKAAAAAFFFFFFFFFFFHHHHHHHHHHEEEEEEEEEQQQQQQQQQLLLLLLLLSSSSSSVVVVVVVAAAAAEEEEEEEEELLLLLLLLTTTTTTTNNNNNNNNTTTTTTTVVVVVVVFFFFFFFFFFFEEEEEEEEEPPPPPPPSSSSSSSSSSSSMMMMMMMMMMMMMMMMAAAAAKKKKKKKKKCCCCCCDDDDDDDDPPPPPPPRRRRRRRRRRRHHHHHHHHHHGGGGKKKKKKKKKYYYYYYYYYYYYMMMMMMMMAAAAACCCCCCCCCCCCLLLLLLLLMMMMMMMMYYYYYYYYYYYYRRRRRRRRRRRGGGGDDDDDDDDVVVVVVVVVVVVVVPPPPPPPKKKKKKKKKDDDDDDDDVVVVVVVTTTTTTTAAAAAAAAAAVVVVVVVAAAAAVVVVVVVIIIIIIIIKKKKKKKKKTTTTTTTKKKKKKKKKRRRRRRRRRRRTTTTTTTIIIIIIIIQQQQQQQQQFFFFFFFFFFFVVVVVVVDDDDDDDDWWWWWWWWWWWWWWCCCCCCPPPPPPPTTTTTTTGGGGFFFFFFFFFFFKKKKKKKKKCCCCCCGGGGIIIIIIIINNNNNNNNYYYYYYYYYYYYQQQQQQQQQAAAAAPPPPPPPSSSSSSVVVVVVVVVVVVVVPPPPPPPGGGGGGGGDDDDDDDDLLLLLLLLAAAAAKKKKKKKKKVVVVVVVQQQQQQQQQRRRRRRRRRRRAAAAALLLLLLLLCCCCCCMMMMMMMMIIIIIIIISSSSSSNNNNNNNNTTTTTTTTTTTTTTAAAAAIIIIIIIIAAAAAEEEEEEEEEVVVVVVVFFFFFFFFFFFSSSSSSRRRRRRRRRRRIIIIIIIIDDDDDDDDHHHHHHHHHHKKKKKKKKKFFFFFFFFFFFDDDDDDDDLLLLLLLLMMMMMMMMYYYYYYYYYYYYAAAAAKKKKKKKKKRRRRRRRRRRRAAAAAFFFFFFFFFFFVVVVVVVHHHHHHHHHHWWWWWWWWWWWWWWYYYYYYYYYYYYVVVVVVVGGGGEEEEEEEEEGGGGMMMMMMMMEEEEEEEEEEEEEEEEEEGGGGEEEEEEEEEFFFFFFFFFFFSSSSSSEEEEEEEEEAAAAARRRRRRRRRRREEEEEEEEEDDDDDDDDLLLLLLLLAAAAAAAAAALLLLLLLLEEEEEEEEEKKKKKKKKKDDDDDDDDYYYYYYYYYYYYEEEEEEEEEEEEEEEEEEVVVVVVVGGGGAAAAAEEEEEEEEETTTTTTTVVVVVVVGGGGDDDDDDDDDDDDDDDDEEEEEEEEEAAAAAEEEEEEEEEEEEEEEEEEEEEEEEEEEMMMMMMMMM

SEQ ID NO: 87 - protein, 3529 aa, Octopus dofleini
MMMMMMMMRRRRRRRRRRREEEEEEEEECCCCCCIIIIIIIISSSSSSIIIIIIIIHHHHHHHHHHVVVVVVVGGGGQQQQQQQQQAAAAAGGGGVVVVVVVQQQQQQQQQIIIIIIIIGGGGNNNNNNNNAAAAACCCCCCWWWWWWWWWWWWWWEEEEEEEEELLLLLLLLYYYYYYYYYYYYCCCCCCLLLLLLLLEEEEEEEEEHHHHHHHHHHGGGGIIIIIIIIQQQQQQQQQPPPPPPPSSSSSSGGGGQQQQQQQQQMMMMMMMMPPPPPPPSSSSSSDDDDDDDDKKKKKKKKKAAAAAVVVVVVVGGGGGGGGKKKKKKKKKDDDDDDDDDDDDDDDDSSSSSSFFFFFFFFFFFNNNNNNNNTTTTTTTFFFFFFFFFFFFFFFFFFFFFFSSSSSSEEEEEEEEETTTTTTTGGGGSSSSSSGGGGKKKKKKKKKHHHHHHHHHHVVVVVVVPPPPPPPRRRRRRRRRRRAAAAAVVVVVVVFFFFFFFFFFFVVVVVVVDDDDDDDDLLLLLLLLEEEEEEEEEPPPPPPPTTTTTTTVVVVVVVVVVVVVVDDDDDDDDEEEEEEEEEIIIIIIIIRRRRRRRRRRRTTTTTTTGGGGLLLLLLLLYYYYYYYYYYYYRRRRRRRRRRRQQQQQQQQQLLLLLLLLFFFFFFFFFFFHHHHHHHHHHPPPPPPPEEEEEEEEEQQQQQQQQQLLLLLLLLIIIIIIIITTTTTTTGGGGKKKKKKKKKEEEEEEEEEDDDDDDDDAAAAAAAAAANNNNNNNNNNNNNNNNYYYYYYYYYYYYAAAAARRRRRRRRRRRGGGGHHHHHHHHHHYYYYYYYYYYYYTTTTTTTIIIIIIIIGGGGKKKKKKKKKEEEEEEEEEHHHHHHHHHHIIIIIIIIDDDDDDDDLLLLLLLLVVVVVVVLLLLLLLLDDDDDDDDRRRRRRRRRRRVVVVVVVRRRRRRRRRRRKKKKKKKKKLLLLLLLLSSSSSSDDDDDDDDQQQQQQQQQCCCCCCTTTTTTTGGGGLLLLLLLLQQQQQQQQQGGGGFFFFFFFFFFFLLLLLLLLIIIIIIIIFFFFFFFFFFFHHHHHHHHHHSSSSSSFFFFFFFFFFFGGGGGGGGGGGGTTTTTTTGGGGSSSSSSGGGGFFFFFFFFFFFTTTTTTTSSSSSSLLLLLLLLLLLLLLLLMMMMMMMMEEEEEEEEERRRRRRRRRRRLLLLLLLLSSSSSSVVVVVVVDDDDDDDDYYYYYYYYYYYYGGGGKKKKKKKKKKKKKKKKKKSSSSSSKKKKKKKKKLLLLLLLLEEEEEEEEEFFFFFFFFFFFSSSSSSIIIIIIIIYYYYYYYYYYYYPPPPPPPAAAAAPPPPPPPQQQQQQQQQVVVVVVVAAAAATTTTTTTAAAAAVVVVVVVVVVVVVVEEEEEEEEEPPPPPPPYYYYYYYYYYYYNNNNNNNNSSSSSSIIIIIIIILLLLLLLLTTTTTTTTTTTTTTHHHHHHHHHHTTTTTTTTTTTTTTLLLLLLLLEEEEEEEEEHHHHHHHHHHSSSSSSDDDDDDDDCCCCCCAAAAAFFFFFFFFFFFMMMMMMMMVVVVVVVDDDDDDDDNNNNNNNNEEEEEEEEEAAAAAIIIIIIIIYYYYYYYYYYYYDDDDDDDDIIIIIIIICCCCCCKKKKKKKKKRRRRRRRRRRRNNNNNNNNLLLLLLLLDDDDDDDDIIIIIIIIEEEEEEEEERRRRRRRRRRRPPPPPPPSSSSSSYYYYYYYYYYYYTTTTTTTNNNNNNNNLLLLLLLLNNNNNNNNRRRRRRRRRRRLLLLLLLLIIIIIIIISSSSSSQQQQQQQQQVVVVVVVVVVVVVVSSSSSSSSSSSSIIIIIIIITTTTTTTAAAAASSSSSSLLLLLLLLRRRRRRRRRRRFFFFFFFFFFFDDDDDDDDGGGGAAAAALLLLLLLLNNNNNNNNVVVVVVVDDDDDDDDLLLLLLLLTTTTTTTEEEEEEEEEFFFFFFFFFFFQQQQQQQQQTTTTTTTNNNNNNNNLLLLLLLLVVVVVVVPPPPPPPYYYYYYYYYYYYPPPPPPPRRRRRRRRRRRIIIIIIIIHHHHHHHHHHFFFFFFFFFFFPPPPPPPLLLLLLLLVVVVVVVTTTTTTTYYYYYYYYYYYYAAAAAPPPPPPPIIIIIIIIIIIIIIIISSSSSSAAAAAEEEEEEEEEKKKKKKKKKAAAAAYYYYYYYYYYYYHHHHHHHHHHEEEEEEEEEQQQQQQQQQLLLLLLLLAAAAAVVVVVVVAAAAAEEEEEEEEEVVVVVVVTTTTTTTSSSSSSAAAAACCCCCCFFFFFFFFFFFEEEEEEEEEPPPPPPPAAAAANNNNNNNNQQQQQQQQQMMMMMMMMVVVVVVVKKKKKKKKKCCCCCCDDDDDDDDPPPPPPPRRRRRRRRRRRHHHHHHHHHHGGGGKKKKKKKKKYYYYYYYYYYYYMMMMMMMMAAAAACCCCCCCCCCCCMMMMMMMMLLLLLLLLYYYYYYYYYYYYRRRRRRRRRRRGGGGDDDDDDDDVVVVVVVVVVVVVVPPPPPPPKKKKKKKKKDDDDDDDDVVVVVVVNNNNNNNNAAAAAAAAAAIIIIIIIIAAAAATTTTTTTIIIIIIIIKKKKKKKKKTTTTTTTKKKKKKKKKRRRRRRRRRRRSSSSSSIIIIIIIIQQQQQQQQQFFFFFFFFFFFVVVVVVVDDDDDDDDWWWWWWWWWWWWWWCCCCCCPPPPPPPTTTTTTTGGGGFFFFFFFFFFFKKKKKKKKKVVVVVVVGGGGIIIIIIIINNNNNNNNYYYYYYYYYYYYQQQQQQQQQPPPPPPPPPPPPPPTTTTTTTVVVVVVVVVVVVVVPPPPPPPGGGGGGGGDDDDDDDDLLLLLLLLAAAAAKKKKKKKKKVVVVVVVQQQQQQQQQRRRRRRRRRRRAAAAAVVVVVVVCCCCCCMMMMMMMMLLLLLLLLSSSSSSNNNNNNNNTTTTTTTTTTTTTTAAAAAVVVVVVVAAAAAEEEEEEEEEAAAAAWWWWWWWWWWWWWWAAAAARRRRRRRRRRRLLLLLLLLDDDDDDDDHHHHHHHHHHKKKKKKKKKFFFFFFFFFFFDDDDDDDDLLLLLLLLMMMMMMMMYYYYYYYYYYYYAAAAAKKKKKKKKKRRRRRRRRRRRAAAAAFFFFFFFFFFFVVVVVVVHHHHHHHHHHWWWWWWWWWWWWWWYYYYYYYYYYYYVVVVVVVGGGGEEEEEEEEEGGGGMMMMMMMMEEEEEEEEEEEEEEEEEEGGGGEEEEEEEEEFFFFFFFFFFFSSSSSSEEEEEEEEEAAAAARRRRRRRRRRREEEEEEEEEDDDDDDDDLLLLLLLLAAAAAAAAAALLLLLLLLEEEEEEEEEKKKKKKKKKDDDDDDDDYYYYYYYYYYYYEEEEEEEEEEEEEEEEEEVVVVVVVGGGGLLLLLLLLDDDDDDDDTTTTTTTFFFFFFFFFFFEEEEEEEEEAAAAAEEEEEEEEEEEEEEEEEEEEEEEEEEEEEEEEEEEEGGGGGGGGDDDDDDDDEEEEEEEEEYYYYYYYYYYYYY

SEQ ID NO: 88 - protein, 1894 aa, Lytechinus pictus
IIIIIIIICCCCCCKKKKKKKKKRRRRRRRRRRRNNNNNNNNLLLLLLLLDDDDDDDDIIIIIIIIEEEEEEEEERRRRRRRRRRRPPPPPPPSSSSSSYYYYYYYYYYYYTTTTTTTNNNNNNNNLLLLLLLLNNNNNNNNRRRRRRRRRRRLLLLLLLLIIIIIIIISSSSSSQQQQQQQQQVVVVVVVVVVVVVVSSSSSSSSSSSSIIIIIIIITTTTTTTAAAAASSSSSSLLLLLLLLRRRRRRRRRRRFFFFFFFFFFFDDDDDDDDGGGGAAAAALLLLLLLLNNNNNNNNVVVVVVVDDDDDDDDLLLLLLLLTTTTTTTEEEEEEEEEFFFFFFFFFFFQQQQQQQQQTTTTTTTNNNNNNNNLLLLLLLLVVVVVVVPPPPPPPYYYYYYYYYYYYPPPPPPPRRRRRRRRRRRIIIIIIIIHHHHHHHHHHFFFFFFFFFFFPPPPPPPLLLLLLLLVVVVVVVTTTTTTTYYYYYYYYYYYYAAAAAPPPPPPPIIIIIIIIIIIIIIIISSSSSSAAAAAEEEEEEEEEKKKKKKKKKAAAAAYYYYYYYYYYYYHHHHHHHHHHEEEEEEEEEQQQQQQQQQLLLLLLLLAAAAAVVVVVVVAAAAAEEEEEEEEEVVVVVVVTTTTTTTSSSSSSAAAAACCCCCCFFFFFFFFFFFEEEEEEEEEPPPPPPPAAAAANNNNNNNNQQQQQQQQQMMMMMMMMVVVVVVVKKKKKKKKKCCCCCCDDDDDDDDPPPPPPPRRRRRRRRRRRHHHHHHHHHHGGGGKKKKKKKKKYYYYYYYYYYYYMMMMMMMMAAAAACCCCCCCCCCCCMMMMMMMMLLLLLLLLYYYYYYYYYYYYRRRRRRRRRRRGGGGDDDDDDDDVVVVVVVVVVVVVVPPPPPPPKKKKKKKKKDDDDDDDDVVVVVVVNNNNNNNNAAAAAAAAAAIIIIIIIIAAAAATTTTTTTIIIIIIIIKKKKKKKKKTTTTTTTKKKKKKKKKRRRRRRRRRRRSSSSSSIIIIIIIIQQQQQQQQQFFFFFFFFFFFVVVVVVVDDDDDDDDWWWWWWWWWWWWWWCCCCCCPPPPPPPTTTTTTTGGGGFFFFFFFFFFFKKKKKKKKKVVVVVVVGGGGIIIIIIIINNNNNNNNYYYYYYYYYYYYQQQQQQQQQPPPPPPPPPPPPPPTTTTTTTVVVVVVVVVVVVVVLLLLLLLLGGGGGGGGDDDDDDDDLLLLLLLLAAAAAKKKKKKKKKVVVVVVVQQQQQQQQQRRRRRRRRRRRAAAAAVVVVVVVCCCCCCMMMMMMMMLLLLLLLLSSSSSSNNNNNNNNTTTTTTTTTTTTTTAAAAAVVVVVVVAAAAAEEEEEEEEEAAAAAWWWWWWWWWWWWWWAAAAARRRRRRRRRRRLLLLLLLLDDDDDDDDHHHHHHHHHHKKKKKKKKKFFFFFFFFFFFDDDDDDDDLLLLLLLLMMMMMMMMYYYYYYYYYYYYAAAAAKKKKKKKKKRRRRRRRRRRRAAAAAFFFFFFFFFFFVVVVVVVHHHHHHHHHHWWWWWWWWWWWWWWYYYYYYYYYYYYVVVVVVVGGGGEEEEEEEEEGGGGMMMMMMMMEEEEEEEEEEEEEEEEEEGGGGEEEEEEEEEFFFFFFFFFFFSSSSSSEEEEEEEEEAAAAARRRRRRRRRRREEEEEEEEEDDDDDDDDLLLLLLLLAAAAAAAAAALLLLLLLLEEEEEEEEEKKKKKKKKKDDDDDDDDYYYYYYYYYYYYEEEEEEEEEEEEEEEEEEVVVVVVVGGGGLLLLLLLLDDDDDDDDTTTTTTTFFFFFFFFFFFEEEEEEEEEAAAAAEEEEEEEEEEEEEEEEEEEEEEEEEEEEEEEEEEEEGGGGGGGGDDDDDDDDEEEEEEEEEYYYYYYYYYYYYY

SEQ ID NO: 89 - protein, 3465 aa, Oncorhynchus keta
MMMMMMMMHHHHHHHHHHVVVVVVVGGGGQQQQQQQQQAAAAAGGGGVVVVVVVQQQQQQQQQMMMMMMMMGGGGNNNNNNNNAAAAACCCCCCWWWWWWWWWWWWWWEEEEEEEEELLLLLLLLYYYYYYYYYYYYCCCCCCLLLLLLLLEEEEEEEEEHHHHHHHHHHGGGGIIIIIIIIQQQQQQQQQPPPPPPPDDDDDDDDGGGGQQQQQQQQQMMMMMMMMPPPPPPPSSSSSSDDDDDDDDKKKKKKKKKTTTTTTTCCCCCCGGGGGGGGGGGGDDDDDDDDDDDDDDDDSSSSSSFFFFFFFFFFFNNNNNNNNTTTTTTTFFFFFFFFFFFFFFFFFFFFFFSSSSSSEEEEEEEEETTTTTTTGGGGAAAAAGGGGKKKKKKKKKHHHHHHHHHHVVVVVVVPPPPPPPRRRRRRRRRRRAAAAAIIIIIIIIFFFFFFFFFFFVVVVVVVDDDDDDDDLLLLLLLLEEEEEEEEEPPPPPPPTTTTTTTVVVVVVVIIIIIIIIDDDDDDDDEEEEEEEEEVVVVVVVRRRRRRRRRRRTTTTTTTGGGGIIIIIIIIYYYYYYYYYYYYRRRRRRRRRRRQQQQQQQQQLLLLLLLLFFFFFFFFFFFHHHHHHHHHHPPPPPPPEEEEEEEEEQQQQQQQQQLLLLLLLLIIIIIIIITTTTTTTGGGGKKKKKKKKKEEEEEEEEEDDDDDDDDAAAAAAAAAANNNNNNNNNNNNNNNNYYYYYYYYYYYYAAAAARRRRRRRRRRRGGGGHHHHHHHHHHYYYYYYYYYYYYTTTTTTTIIIIIIIIGGGGKKKKKKKKKEEEEEEEEEIIIIIIIIIIIIIIIIDDDDDDDDIIIIIIIIVVVVVVVLLLLLLLLDDDDDDDDRRRRRRRRRRRTTTTTTTRRRRRRRRRRRKKKKKKKKKLLLLLLLLAAAAADDDDDDDDQQQQQQQQQCCCCCCTTTTTTTGGGGLLLLLLLLQQQQQQQQQGGGGFFFFFFFFFFFLLLLLLLLIIIIIIIIFFFFFFFFFFFHHHHHHHHHHSSSSSSFFFFFFFFFFFGGGGGGGGGGGGTTTTTTTGGGGSSSSSSGGGGFFFFFFFFFFFTTTTTTTSSSSSSLLLLLLLLLLLLLLLLMMMMMMMMEEEEEEEEERRRRRRRRRRRLLLLLLLLSSSSSSVVVVVVVDDDDDDDDYYYYYYYYYYYYGGGGKKKKKKKKKKKKKKKKKKSSSSSSKKKKKKKKKLLLLLLLLEEEEEEEEEFFFFFFFFFFFAAAAAVVVVVVVYYYYYYYYYYYYPPPPPPPAAAAAPPPPPPPQQQQQQQQQVVVVVVVSSSSSSTTTTTTTAAAAAVVVVVVVVVVVVVVEEEEEEEEEPPPPPPPYYYYYYYYYYYYNNNNNNNNSSSSSSIIIIIIIILLLLLLLLTTTTTTTTTTTTTTHHHHHHHHHHTTTTTTTTTTTTTTLLLLLLLLEEEEEEEEEHHHHHHHHHHSSSSSSDDDDDDDDCCCCCCAAAAAFFFFFFFFFFFMMMMMMMMVVVVVVVDDDDDDDDNNNNNNNNEEEEEEEEEAAAAAIIIIIIIIYYYYYYYYYYYYDDDDDDDDIIIIIIIICCCCCCRRRRRRRRRRRRRRRRRRRRRRNNNNNNNNLLLLLLLLDDDDDDDDIIIIIIIIEEEEEEEEERRRRRRRRRRRPPPPPPPSSSSSSYYYYYYYYYYYYTTTTTTTNNNNNNNNLLLLLLLLNNNNNNNNRRRRRRRRRRRLLLLLLLLIIIIIIIIGGGGQQQQQQQQQIIIIIIIIVVVVVVVSSSSSSSSSSSSIIIIIIIITTTTTTTAAAAASSSSSSLLLLLLLLRRRRRRRRRRRFFFFFFFFFFFDDDDDDDDGGGGAAAAALLLLLLLLNNNNNNNNVVVVVVVDDDDDDDDLLLLLLLLTTTTTTTEEEEEEEEEFFFFFFFFFFFQQQQQQQQQTTTTTTTNNNNNNNNLLLLLLLLVVVVVVVPPPPPPPYYYYYYYYYYYYPPPPPPPRRRRRRRRRRRIIIIIIIIHHHHHHHHHHFFFFFFFFFFFPPPPPPPLLLLLLLLAAAAATTTTTTTYYYYYYYYYYYYAAAAAPPPPPPPVVVVVVVIIIIIIIISSSSSSAAAAAEEEEEEEEEKKKKKKKKKAAAAAYYYYYYYYYYYYHHHHHHHHHHEEEEEEEEEQQQQQQQQQLLLLLLLLSSSSSSVVVVVVVAAAAADDDDDDDDIIIIIIIITTTTTTTNNNNNNNNAAAAACCCCCCFFFFFFFFFFFEEEEEEEEEPPPPPPPAAAAANNNNNNNNQQQQQQQQQMMMMMMMMVVVVVVVKKKKKKKKKCCCCCCDDDDDDDDPPPPPPPRRRRRRRRRRRHHHHHHHHHHGGGGKKKKKKKKKYYYYYYYYYYYYMMMMMMMMAAAAACCCCCCCCCCCCLLLLLLLLLLLLLLLLYYYYYYYYYYYYRRRRRRRRRRRGGGGDDDDDDDDVVVVVVVVVVVVVVPPPPPPPKKKKKKKKKDDDDDDDDVVVVVVVNNNNNNNNSSSSSSAAAAAIIIIIIIIAAAAAAAAAAIIIIIIIIKKKKKKKKKTTTTTTTKKKKKKKKKRRRRRRRRRRRSSSSSSIIIIIIIIQQQQQQQQQFFFFFFFFFFFVVVVVVVDDDDDDDDWWWWWWWWWWWWWWCCCCCCPPPPPPPTTTTTTTGGGGFFFFFFFFFFFKKKKKKKKKVVVVVVVGGGGIIIIIIIINNNNNNNNYYYYYYYYYYYYQQQQQQQQQPPPPPPPPPPPPPPTTTTTTTVVVVVVVVVVVVVVPPPPPPPGGGGGGGGDDDDDDDDLLLLLLLLAAAAAKKKKKKKKKVVVVVVVQQQQQQQQQRRRRRRRRRRRAAAAAVVVVVVVCCCCCCMMMMMMMMLLLLLLLLSSSSSSNNNNNNNNTTTTTTTTTTTTTTAAAAAIIIIIIIIAAAAAEEEEEEEEEAAAAAWWWWWWWWWWWWWWAAAAARRRRRRRRRRRLLLLLLLLDDDDDDDDHHHHHHHHHHKKKKKKKKKFFFFFFFFFFFDDDDDDDDLLLLLLLLMMMMMMMMYYYYYYYYYYYYAAAAAKKKKKKKKKRRRRRRRRRRRAAAAAFFFFFFFFFFFVVVVVVVHHHHHHHHHHWWWWWWWWWWWWWWYYYYYYYYYYYYVVVVVVVGGGGEEEEEEEEEGGGGMMMMMMMMEEEEEEEEEEEEEEEEEEGGGGEEEEEEEEEFFFFFFFFFFFSSSSSSEEEEEEEEEAAAAARRRRRRRRRRREEEEEEEEEDDDDDDDDMMMMMMMMAAAAAAAAAALLLLLLLLEEEEEEEEEKKKKKKKKKDDDDDDDDYYYYYYYYYYYYEEEEEEEEEEEEEEEEEEVVVVVVVGGGGTTTTTTTDDDDDDDDSSSSSSVVVVVVVGGGGEEEEEEEEEEEEEEEEEEDDDDDDDDEEEEEEEEEEEEEEEEEEGGGGEEEEEEEEEEEEEEEEEEYYYYYYYYYYYYY

SEQ ID NO: 90 - protein, 3481 aa, Oxytricha granulifera
MMMMMMMMRRRRRRRRRRREEEEEEEEEVVVVVVVIIIIIIIISSSSSSIIIIIIIIHHHHHHHHHHVVVVVVVGGGGQQQQQQQQQAAAAAGGGGIIIIIIIIQQQQQQQQQVVVVVVVGGGGNNNNNNNNAAAAACCCCCCWWWWWWWWWWWWWWEEEEEEEEELLLLLLLLFFFFFFFFFFFCCCCCCLLLLLLLLEEEEEEEEEHHHHHHHHHHGGGGIIIIIIIIQQQQQQQQQPPPPPPPDDDDDDDDGGGGQQQQQQQQQMMMMMMMMPPPPPPPSSSSSSDDDDDDDDKKKKKKKKKTTTTTTTIIIIIIIIGGGGGGGGGGGGDDDDDDDDDDDDDDDDAAAAAFFFFFFFFFFFNNNNNNNNTTTTTTTFFFFFFFFFFFFFFFFFFFFFFSSSSSSEEEEEEEEETTTTTTTGGGGAAAAAGGGGKKKKKKKKKHHHHHHHHHHVVVVVVVPPPPPPPRRRRRRRRRRRCCCCCCVVVVVVVFFFFFFFFFFFLLLLLLLLDDDDDDDDLLLLLLLLEEEEEEEEEPPPPPPPTTTTTTTVVVVVVVDDDDDDDDDDDDDDDDEEEEEEEEEVVVVVVVRRRRRRRRRRRTTTTTTTGGGGTTTTTTTYYYYYYYYYYYYRRRRRRRRRRRQQQQQQQQQLLLLLLLLFFFFFFFFFFFHHHHHHHHHHPPPPPPPEEEEEEEEEQQQQQQQQQLLLLLLLLIIIIIIIISSSSSSGGGGKKKKKKKKKEEEEEEEEEDDDDDDDDAAAAAAAAAANNNNNNNNNNNNNNNNFFFFFFFFFFFAAAAARRRRRRRRRRRGGGGHHHHHHHHHHYYYYYYYYYYYYTTTTTTTIIIIIIIIGGGGKKKKKKKKKEEEEEEEEEIIIIIIIIVVVVVVVDDDDDDDDLLLLLLLLCCCCCCLLLLLLLLDDDDDDDDRRRRRRRRRRRIIIIIIIIRRRRRRRRRRRKKKKKKKKKLLLLLLLLAAAAADDDDDDDDQQQQQQQQQCCCCCCTTTTTTTGGGGLLLLLLLLQQQQQQQQQGGGGFFFFFFFFFFFLLLLLLLLVVVVVVVFFFFFFFFFFFNNNNNNNNSSSSSSVVVVVVVGGGGGGGGGGGGTTTTTTTGGGGSSSSSSGGGGLLLLLLLLGGGGSSSSSSLLLLLLLLLLLLLLLLLLLLLLLLEEEEEEEEERRRRRRRRRRRLLLLLLLLSSSSSSVVVVVVVDDDDDDDDYYYYYYYYYYYYGGGGKKKKKKKKKKKKKKKKKKSSSSSSKKKKKKKKKLLLLLLLLGGGGFFFFFFFFFFFTTTTTTTVVVVVVVYYYYYYYYYYYYPPPPPPPSSSSSSPPPPPPPQQQQQQQQQVVVVVVVSSSSSSTTTTTTTAAAAAVVVVVVVVVVVVVVEEEEEEEEEPPPPPPPYYYYYYYYYYYYNNNNNNNNSSSSSSVVVVVVVLLLLLLLLSSSSSSTTTTTTTHHHHHHHHHHSSSSSSLLLLLLLLLLLLLLLLEEEEEEEEEHHHHHHHHHHTTTTTTTDDDDDDDDVVVVVVVAAAAAVVVVVVVMMMMMMMMLLLLLLLLDDDDDDDDNNNNNNNNEEEEEEEEEAAAAAVVVVVVVYYYYYYYYYYYYDDDDDDDDIIIIIIIICCCCCCRRRRRRRRRRRRRRRRRRRRRRNNNNNNNNLLLLLLLLDDDDDDDDIIIIIIIIEEEEEEEEERRRRRRRRRRRPPPPPPPTTTTTTTYYYYYYYYYYYYTTTTTTTNNNNNNNNLLLLLLLLNNNNNNNNRRRRRRRRRRRLLLLLLLLIIIIIIIIAAAAAQQQQQQQQQVVVVVVVIIIIIIIISSSSSSSSSSSSLLLLLLLLTTTTTTTAAAAASSSSSSLLLLLLLLRRRRRRRRRRRFFFFFFFFFFFDDDDDDDDGGGGAAAAALLLLLLLLNNNNNNNNVVVVVVVDDDDDDDDVVVVVVVTTTTTTTEEEEEEEEEFFFFFFFFFFFQQQQQQQQQTTTTTTTNNNNNNNNLLLLLLLLVVVVVVVPPPPPPPYYYYYYYYYYYYPPPPPPPRRRRRRRRRRRIIIIIIIIHHHHHHHHHHFFFFFFFFFFFMMMMMMMMLLLLLLLLSSSSSSSSSSSSYYYYYYYYYYYYAAAAAPPPPPPPVVVVVVVIIIIIIIISSSSSSAAAAAEEEEEEEEEKKKKKKKKKAAAAAYYYYYYYYYYYYHHHHHHHHHHEEEEEEEEEQQQQQQQQQLLLLLLLLSSSSSSVVVVVVVAAAAAEEEEEEEEEIIIIIIIITTTTTTTNNNNNNNNSSSSSSAAAAAFFFFFFFFFFFEEEEEEEEEPPPPPPPAAAAASSSSSSMMMMMMMMMMMMMMMMAAAAAKKKKKKKKKCCCCCCDDDDDDDDPPPPPPPRRRRRRRRRRRHHHHHHHHHHGGGGKKKKKKKKKYYYYYYYYYYYYMMMMMMMMAAAAACCCCCCCCCCCCLLLLLLLLMMMMMMMMYYYYYYYYYYYYRRRRRRRRRRRGGGGDDDDDDDDVVVVVVVVVVVVVVPPPPPPPKKKKKKKKKDDDDDDDDVVVVVVVNNNNNNNNAAAAAAAAAAVVVVVVVAAAAATTTTTTTIIIIIIIIKKKKKKKKKTTTTTTTKKKKKKKKKRRRRRRRRRRRTTTTTTTIIIIIIIIQQQQQQQQQFFFFFFFFFFFVVVVVVVDDDDDDDDWWWWWWWWWWWWWWCCCCCCPPPPPPPTTTTTTTGGGGFFFFFFFFFFFKKKKKKKKKCCCCCCGGGGIIIIIIIINNNNNNNNYYYYYYYYYYYYQQQQQQQQQPPPPPPPPPPPPPPTTTTTTTVVVVVVVVVVVVVVPPPPPPPGGGGGGGGDDDDDDDDLLLLLLLLAAAAAKKKKKKKKKVVVVVVVMMMMMMMMRRRRRRRRRRRAAAAAVVVVVVVCCCCCCMMMMMMMMIIIIIIIISSSSSSNNNNNNNNSSSSSSTTTTTTTAAAAAIIIIIIIIAAAAAEEEEEEEEEVVVVVVVFFFFFFFFFFFSSSSSSRRRRRRRRRRRIIIIIIIIDDDDDDDDHHHHHHHHHHKKKKKKKKKFFFFFFFFFFFDDDDDDDDLLLLLLLLMMMMMMMMYYYYYYYYYYYYAAAAAKKKKKKKKKRRRRRRRRRRRAAAAAFFFFFFFFFFFVVVVVVVHHHHHHHHHHWWWWWWWWWWWWWWYYYYYYYYYYYYVVVVVVVGGGGEEEEEEEEEGGGGMMMMMMMMEEEEEEEEEEEEEEEEEEGGGGEEEEEEEEEFFFFFFFFFFFSSSSSSEEEEEEEEEAAAAARRRRRRRRRRREEEEEEEEEDDDDDDDDLLLLLLLLAAAAAAAAAALLLLLLLLEEEEEEEEEKKKKKKKKKDDDDDDDDYYYYYYYYYYYYEEEEEEEEEEEEEEEEEEVVVVVVVGGGGIIIIIIIIEEEEEEEEETTTTTTTAAAAAEEEEEEEEEGGGGEEEEEEEEEGGGGEEEEEEEEEEEEEEEEEEEEEEEEEEEGGGGMMMMMMMMEEEEEEEEEE

SEQ ID NO: 91 - protein, 885 aa, Picea abies
CCCCCCWWWWWWWWWWWWWWEEEEEEEEELLLLLLLLYYYYYYYYYYYYWWWWWWWWWWWWWWLLLLLLLLEEEEEEEEEHHHHHHHHHHGGGGIIIIIIIIQQQQQQQQQPPPPPPPDDDDDDDDGGGGMMMMMMMMMMMMMMMMPPPPPPPSSSSSSDDDDDDDDTTTTTTTTTTTTTTVVVVVVVGGGGVVVVVVVGGGGDDDDDDDDDDDDDDDDAAAAAFFFFFFFFFFFNNNNNNNNTTTTTTTFFFFFFFFFFFFFFFFFFFFFFSSSSSSEEEEEEEEETTTTTTTGGGGAAAAAGGGGKKKKKKKKKHHHHHHHHHHVVVVVVVPPPPPPPRRRRRRRRRRRAAAAAVVVVVVVFFFFFFFFFFFVVVVVVVDDDDDDDDLLLLLLLLEEEEEEEEEPPPPPPPTTTTTTTVVVVVVVIIIIIIIIDDDDDDDDEEEEEEEEEVVVVVVVRRRRRRRRRRRTTTTTTTGGGGAAAAAYYYYYYYYYYYYRRRRRRRRRRRQQQQQQQQQLLLLLLLLFFFFFFFFFFFHHHHHHHHHHPPPPPPPEEEEEEEEEQQQQQQQQQLLLLLLLLIIIIIIIISSSSSSGGGGKKKKKKKKKEEEEEEEEEDDDDDDDDAAAAAAAAAANNNNNNNNNNNNNNNNFFFFFFFFFFFAAAAARRRRRRRRRRRGGGGHHHHHHHHHHYYYYYYYYYYYYTTTTTTTVVVVVVVGGGGEEEEEEEEEEEEEEEEEEIIIIIIIIVVVVVVVDDDDDDDDLLLLLLLLCCCCCCLLLLLLLLDDDDDDDDRRRRRRRRRRRVVVVVVVRRRRRRRRRRRKKKKKKKKKLLLLLLLLAAAAADDDDDDDDNNNNNNNNCCCCCCTTTTTTTGGGGLLLLLLLLL

SEQ ID NO: 92 - protein, 3519 aa, Sus scrofa
MMMMMMMMRRRRRRRRRRREEEEEEEEECCCCCCIIIIIIIISSSSSSIIIIIIIIHHHHHHHHHHVVVVVVVGGGGQQQQQQQQQAAAAAGGGGVVVVVVVQQQQQQQQQIIIIIIIIGGGGNNNNNNNNAAAAACCCCCCWWWWWWWWWWWWWWEEEEEEEEELLLLLLLLYYYYYYYYYYYYCCCCCCLLLLLLLLEEEEEEEEEHHHHHHHHHHGGGGIIIIIIIIQQQQQQQQQPPPPPPPDDDDDDDDGGGGQQQQQQQQQMMMMMMMMPPPPPPPSSSSSSDDDDDDDDKKKKKKKKKTTTTTTTIIIIIIIIGGGGGGGGGGGGDDDDDDDDDDDDDDDDSSSSSSFFFFFFFFFFFNNNNNNNNTTTTTTTFFFFFFFFFFFFFFFFFFFFFFSSSSSSEEEEEEEEETTTTTTTGGGGAAAAAGGGGKKKKKKKKKHHHHHHHHHHVVVVVVVPPPPPPPRRRRRRRRRRRAAAAAVVVVVVVFFFFFFFFFFFVVVVVVVDDDDDDDDLLLLLLLLEEEEEEEEEPPPPPPPTTTTTTTVVVVVVVIIIIIIIIDDDDDDDDEEEEEEEEEVVVVVVVRRRRRRRRRRRTTTTTTTGGGGTTTTTTTYYYYYYYYYYYYRRRRRRRRRRRQQQQQQQQQLLLLLLLLFFFFFFFFFFFHHHHHHHHHHPPPPPPPEEEEEEEEEQQQQQQQQQLLLLLLLLIIIIIIIITTTTTTTGGGGKKKKKKKKKEEEEEEEEEDDDDDDDDAAAAAAAAAANNNNNNNNNNNNNNNNYYYYYYYYYYYYAAAAARRRRRRRRRRRGGGGHHHHHHHHHHYYYYYYYYYYYYTTTTTTTIIIIIIIIGGGGKKKKKKKKKEEEEEEEEEIIIIIIIIIIIIIIIIDDDDDDDDLLLLLLLLVVVVVVVLLLLLLLLDDDDDDDDRRRRRRRRRRRIIIIIIIIRRRRRRRRRRRKKKKKKKKKLLLLLLLLAAAAADDDDDDDDQQQQQQQQQCCCCCCTTTTTTTGGGGLLLLLLLLQQQQQQQQQGGGGFFFFFFFFFFFSSSSSSVVVVVVVFFFFFFFFFFFHHHHHHHHHHSSSSSSFFFFFFFFFFFGGGGGGGGGGGGTTTTTTTGGGGSSSSSSGGGGFFFFFFFFFFFTTTTTTTSSSSSSLLLLLLLLLLLLLLLLMMMMMMMMEEEEEEEEERRRRRRRRRRRLLLLLLLLSSSSSSVVVVVVVDDDDDDDDYYYYYYYYYYYYGGGGKKKKKKKKKKKKKKKKKKSSSSSSKKKKKKKKKLLLLLLLLEEEEEEEEEFFFFFFFFFFFSSSSSSIIIIIIIIYYYYYYYYYYYYPPPPPPPAAAAAPPPPPPPQQQQQQQQQVVVVVVVSSSSSSTTTTTTTAAAAAVVVVVVVVVVVVVVEEEEEEEEEPPPPPPPYYYYYYYYYYYYNNNNNNNNSSSSSSIIIIIIIILLLLLLLLTTTTTTTTTTTTTTHHHHHHHHHHTTTTTTTTTTTTTTLLLLLLLLEEEEEEEEEHHHHHHHHHHSSSSSSDDDDDDDDCCCCCCAAAAAFFFFFFFFFFFMMMMMMMMVVVVVVVDDDDDDDDNNNNNNNNEEEEEEEEEAAAAAIIIIIIIIYYYYYYYYYYYYDDDDDDDDIIIIIIIICCCCCCRRRRRRRRRRRRRRRRRRRRRRNNNNNNNNLLLLLLLLDDDDDDDDIIIIIIIIEEEEEEEEERRRRRRRRRRRPPPPPPPTTTTTTTYYYYYYYYYYYYTTTTTTTNNNNNNNNLLLLLLLLNNNNNNNNRRRRRRRRRRRLLLLLLLLIIIIIIIIGGGGQQQQQQQQQIIIIIIIIVVVVVVVSSSSSSSSSSSSIIIIIIIITTTTTTTAAAAASSSSSSLLLLLLLLRRRRRRRRRRRFFFFFFFFFFFDDDDDDDDGGGGAAAAALLLLLLLLNNNNNNNNVVVVVVVDDDDDDDDLLLLLLLLTTTTTTTEEEEEEEEEFFFFFFFFFFFQQQQQQQQQTTTTTTTNNNNNNNNLLLLLLLLVVVVVVVPPPPPPPYYYYYYYYYYYYPPPPPPPRRRRRRRRRRRAAAAAHHHHHHHHHHFFFFFFFFFFFPPPPPPPLLLLLLLLAAAAATTTTTTTYYYYYYYYYYYYAAAAAPPPPPPPVVVVVVVIIIIIIIISSSSSSAAAAAEEEEEEEEEKKKKKKKKKAAAAAYYYYYYYYYYYYHHHHHHHHHHEEEEEEEEEQQQQQQQQQLLLLLLLLSSSSSSVVVVVVVAAAAAEEEEEEEEEIIIIIIIITTTTTTTNNNNNNNNAAAAACCCCCCFFFFFFFFFFFEEEEEEEEEPPPPPPPAAAAANNNNNNNNQQQQQQQQQMMMMMMMMVVVVVVVKKKKKKKKKCCCCCCDDDDDDDDPPPPPPPRRRRRRRRRRRHHHHHHHHHHGGGGKKKKKKKKKYYYYYYYYYYYYMMMMMMMMAAAAACCCCCCCCCCCCLLLLLLLLLLLLLLLLYYYYYYYYYYYYRRRRRRRRRRRGGGGDDDDDDDDVVVVVVVVVVVVVVPPPPPPPKKKKKKKKKDDDDDDDDVVVVVVVNNNNNNNNAAAAAAAAAAIIIIIIIIAAAAATTTTTTTIIIIIIIIKKKKKKKKKTTTTTTTKKKKKKKKKRRRRRRRRRRRTTTTTTTIIIIIIIIQQQQQQQQQFFFFFFFFFFFVVVVVVVDDDDDDDDWWWWWWWWWWWWWWCCCCCCPPPPPPPTTTTTTTGGGGFFFFFFFFFFFKKKKKKKKKVVVVVVVGGGGIIIIIIIINNNNNNNNYYYYYYYYYYYYEEEEEEEEEPPPPPPPPPPPPPPTTTTTTTVVVVVVVVVVVVVVPPPPPPPGGGGGGGGDDDDDDDDLLLLLLLLAAAAAKKKKKKKKKVVVVVVVQQQQQQQQQRRRRRRRRRRRAAAAAVVVVVVVCCCCCCMMMMMMMMLLLLLLLLSSSSSSNNNNNNNNTTTTTTTTTTTTTTAAAAAIIIIIIIIAAAAAEEEEEEEEEAAAAAWWWWWWWWWWWWWWAAAAARRRRRRRRRRRLLLLLLLLDDDDDDDDHHHHHHHHHHKKKKKKKKKFFFFFFFFFFFDDDDDDDDLLLLLLLLMMMMMMMMYYYYYYYYYYYYAAAAAKKKKKKKKKRRRRRRRRRRRAAAAAFFFFFFFFFFFVVVVVVVHHHHHHHHHHWWWWWWWWWWWWWWYYYYYYYYYYYYVVVVVVVGGGGEEEEEEEEEGGGGMMMMMMMMEEEEEEEEEEEEEEEEEEGGGGEEEEEEEEEFFFFFFFFFFFSSSSSSEEEEEEEEEAAAAARRRRRRRRRRREEEEEEEEEDDDDDDDDMMMMMMMMAAAAAAAAAALLLLLLLLEEEEEEEEEKKKKKKKKKDDDDDDDDYYYYYYYYYYYYEEEEEEEEEEEEEEEEEEVVVVVVVGGGGVVVVVVVDDDDDDDDSSSSSSVVVVVVVEEEEEEEEEGGGGEEEEEEEEEGGGGEEEEEEEEEEEEEEEEEEEEEEEEEEEGGGGEEEEEEEEEEEEEEEEEEYYYYYYYYYYYYY

SEQ ID NO: 93 - protein, 3524 aa, Plasmodium falciparum
MMMMMMMMRRRRRRRRRRREEEEEEEEEVVVVVVVIIIIIIIISSSSSSIIIIIIIIHHHHHHHHHHVVVVVVVGGGGQQQQQQQQQAAAAAGGGGIIIIIIIIQQQQQQQQQVVVVVVVGGGGNNNNNNNNAAAAACCCCCCWWWWWWWWWWWWWWEEEEEEEEELLLLLLLLFFFFFFFFFFFCCCCCCLLLLLLLLEEEEEEEEEHHHHHHHHHHGGGGIIIIIIIIQQQQQQQQQPPPPPPPDDDDDDDDGGGGQQQQQQQQQMMMMMMMMPPPPPPPSSSSSSDDDDDDDDKKKKKKKKKAAAAASSSSSSRRRRRRRRRRRAAAAANNNNNNNNDDDDDDDDDDDDDDDDAAAAAFFFFFFFFFFFNNNNNNNNTTTTTTTFFFFFFFFFFFFFFFFFFFFFFSSSSSSEEEEEEEEETTTTTTTGGGGAAAAAGGGGKKKKKKKKKHHHHHHHHHHVVVVVVVPPPPPPPRRRRRRRRRRRCCCCCCVVVVVVVFFFFFFFFFFFVVVVVVVDDDDDDDDLLLLLLLLEEEEEEEEEPPPPPPPTTTTTTTVVVVVVVVVVVVVVDDDDDDDDEEEEEEEEEVVVVVVVRRRRRRRRRRRTTTTTTTGGGGTTTTTTTYYYYYYYYYYYYRRRRRRRRRRRQQQQQQQQQLLLLLLLLFFFFFFFFFFFHHHHHHHHHHPPPPPPPEEEEEEEEEQQQQQQQQQLLLLLLLLIIIIIIIISSSSSSGGGGKKKKKKKKKEEEEEEEEEDDDDDDDDAAAAAAAAAANNNNNNNNNNNNNNNNFFFFFFFFFFFAAAAARRRRRRRRRRRGGGGHHHHHHHHHHYYYYYYYYYYYYTTTTTTTIIIIIIIIGGGGKKKKKKKKKEEEEEEEEEVVVVVVVIIIIIIIIDDDDDDDDVVVVVVVCCCCCCLLLLLLLLDDDDDDDDRRRRRRRRRRRIIIIIIIIRRRRRRRRRRRKKKKKKKKKLLLLLLLLAAAAADDDDDDDDNNNNNNNNCCCCCCTTTTTTTGGGGLLLLLLLLQQQQQQQQQGGGGFFFFFFFFFFFLLLLLLLLMMMMMMMMFFFFFFFFFFFSSSSSSAAAAAVVVVVVVGGGGGGGGGGGGTTTTTTTGGGGSSSSSSGGGGFFFFFFFFFFFGGGGCCCCCCLLLLLLLLMMMMMMMMLLLLLLLLEEEEEEEEERRRRRRRRRRRLLLLLLLLSSSSSSVVVVVVVDDDDDDDDYYYYYYYYYYYYGGGGKKKKKKKKKKKKKKKKKKSSSSSSKKKKKKKKKLLLLLLLLNNNNNNNNFFFFFFFFFFFCCCCCCCCCCCCWWWWWWWWWWWWWWPPPPPPPSSSSSSPPPPPPPQQQQQQQQQVVVVVVVSSSSSSTTTTTTTAAAAAVVVVVVVVVVVVVVEEEEEEEEEPPPPPPPYYYYYYYYYYYYNNNNNNNNSSSSSSVVVVVVVLLLLLLLLSSSSSSTTTTTTTHHHHHHHHHHSSSSSSLLLLLLLLLLLLLLLLEEEEEEEEEHHHHHHHHHHTTTTTTTDDDDDDDDVVVVVVVAAAAAIIIIIIIIMMMMMMMMLLLLLLLLDDDDDDDDNNNNNNNNEEEEEEEEEAAAAAIIIIIIIIYYYYYYYYYYYYDDDDDDDDIIIIIIIICCCCCCRRRRRRRRRRRRRRRRRRRRRRNNNNNNNNLLLLLLLLDDDDDDDDIIIIIIIIEEEEEEEEERRRRRRRRRRRPPPPPPPTTTTTTTYYYYYYYYYYYYTTTTTTTNNNNNNNNLLLLLLLLNNNNNNNNRRRRRRRRRRRLLLLLLLLIIIIIIIIAAAAAQQQQQQQQQVVVVVVVIIIIIIIISSSSSSSSSSSSLLLLLLLLTTTTTTTAAAAASSSSSSLLLLLLLLRRRRRRRRRRRFFFFFFFFFFFDDDDDDDDGGGGAAAAALLLLLLLLNNNNNNNNVVVVVVVDDDDDDDDVVVVVVVTTTTTTTEEEEEEEEEFFFFFFFFFFFQQQQQQQQQTTTTTTTNNNNNNNNLLLLLLLLVVVVVVVPPPPPPPYYYYYYYYYYYYPPPPPPPRRRRRRRRRRRIIIIIIIIHHHHHHHHHHFFFFFFFFFFFMMMMMMMMLLLLLLLLSSSSSSSSSSSSYYYYYYYYYYYYAAAAAPPPPPPPVVVVVVVVVVVVVVSSSSSSAAAAAEEEEEEEEEKKKKKKKKKAAAAAYYYYYYYYYYYYHHHHHHHHHHEEEEEEEEEQQQQQQQQQLLLLLLLLSSSSSSVVVVVVVSSSSSSEEEEEEEEEIIIIIIIITTTTTTTNNNNNNNNSSSSSSAAAAAFFFFFFFFFFFEEEEEEEEEPPPPPPPAAAAANNNNNNNNMMMMMMMMMMMMMMMMAAAAAKKKKKKKKKCCCCCCDDDDDDDDPPPPPPPRRRRRRRRRRRHHHHHHHHHHGGGGKKKKKKKKKYYYYYYYYYYYYMMMMMMMMAAAAACCCCCCCCCCCCLLLLLLLLMMMMMMMMYYYYYYYYYYYYRRRRRRRRRRRGGGGDDDDDDDDVVVVVVVVVVVVVVPPPPPPPKKKKKKKKKDDDDDDDDVVVVVVVNNNNNNNNAAAAAAAAAAVVVVVVVAAAAATTTTTTTIIIIIIIIKKKKKKKKKTTTTTTTKKKKKKKKKRRRRRRRRRRRTTTTTTTIIIIIIIIQQQQQQQQQFFFFFFFFFFFVVVVVVVDDDDDDDDWWWWWWWWWWWWWWCCCCCCPPPPPPPTTTTTTTGGGGFFFFFFFFFFFKKKKKKKKKCCCCCCGGGGIIIIIIIINNNNNNNNYYYYYYYYYYYYQQQQQQQQQPPPPPPPPPPPPPPTTTTTTTVVVVVVVVVVVVVVPPPPPPPGGGGGGGGDDDDDDDDLLLLLLLLAAAAAKKKKKKKKKVVVVVVVMMMMMMMMRRRRRRRRRRRAAAAAVVVVVVVCCCCCCMMMMMMMMIIIIIIIISSSSSSNNNNNNNNSSSSSSTTTTTTTAAAAAIIIIIIIIAAAAAEEEEEEEEEVVVVVVVFFFFFFFFFFFSSSSSSRRRRRRRRRRRMMMMMMMMDDDDDDDDQQQQQQQQQKKKKKKKKKFFFFFFFFFFFDDDDDDDDLLLLLLLLMMMMMMMMYYYYYYYYYYYYAAAAAKKKKKKKKKRRRRRRRRRRRAAAAAFFFFFFFFFFFVVVVVVVHHHHHHHHHHWWWWWWWWWWWWWWYYYYYYYYYYYYVVVVVVVGGGGEEEEEEEEEGGGGMMMMMMMMEEEEEEEEEEEEEEEEEEGGGGEEEEEEEEEFFFFFFFFFFFSSSSSSEEEEEEEEEAAAAARRRRRRRRRRREEEEEEEEEDDDDDDDDLLLLLLLLAAAAAAAAAALLLLLLLLEEEEEEEEEKKKKKKKKKDDDDDDDDYYYYYYYYYYYYEEEEEEEEEEEEEEEEEEVVVVVVVGGGGIIIIIIIIEEEEEEEEESSSSSSNNNNNNNNEEEEEEEEEAAAAAEEEEEEEEEGGGGEEEEEEEEEDDDDDDDDEEEEEEEEEGGGGYYYYYYYYYYYYEEEEEEEEEAAAAADDDDDDDDYYYYYYYYYYYYY

SEQ ID NO: 94 - protein, 1548 aa, Plasmodium berghei
EEEEEEEEEFFFFFFFFFFFQQQQQQQQQTTTTTTTNNNNNNNNLLLLLLLLVVVVVVVPPPPPPPYYYYYYYYYYYYPPPPPPPRRRRRRRRRRRIIIIIIIIHHHHHHHHHHFFFFFFFFFFFMMMMMMMMLLLLLLLLSSSSSSSSSSSSYYYYYYYYYYYYAAAAAPPPPPPPVVVVVVVIIIIIIIISSSSSSAAAAAEEEEEEEEEKKKKKKKKKAAAAAYYYYYYYYYYYYHHHHHHHHHHEEEEEEEEEQQQQQQQQQLLLLLLLLSSSSSSVVVVVVVSSSSSSEEEEEEEEEIIIIIIIITTTTTTTNNNNNNNNSSSSSSAAAAAFFFFFFFFFFFEEEEEEEEEPPPPPPPAAAAASSSSSSMMMMMMMMMMMMMMMMAAAAAKKKKKKKKKCCCCCCDDDDDDDDPPPPPPPRRRRRRRRRRRHHHHHHHHHHGGGGKKKKKKKKKYYYYYYYYYYYYMMMMMMMMAAAAACCCCCCCCCCCCLLLLLLLLMMMMMMMMYYYYYYYYYYYYRRRRRRRRRRRGGGGDDDDDDDDVVVVVVVVVVVVVVPPPPPPPKKKKKKKKKDDDDDDDDVVVVVVVNNNNNNNNAAAAAAAAAAVVVVVVVAAAAATTTTTTTIIIIIIIIKKKKKKKKKTTTTTTTKKKKKKKKKRRRRRRRRRRRSSSSSSIIIIIIIIQQQQQQQQQFFFFFFFFFFFVVVVVVVDDDDDDDDWWWWWWWWWWWWWWCCCCCCPPPPPPPTTTTTTTGGGGFFFFFFFFFFFKKKKKKKKKCCCCCCGGGGIIIIIIIINNNNNNNNYYYYYYYYYYYYQQQQQQQQQPPPPPPPPPPPPPPTTTTTTTVVVVVVVVVVVVVVPPPPPPPGGGGGGGGDDDDDDDDLLLLLLLLAAAAAKKKKKKKKKVVVVVVVMMMMMMMMRRRRRRRRRRRAAAAAVVVVVVVCCCCCCMMMMMMMMIIIIIIIISSSSSSNNNNNNNNSSSSSSTTTTTTTAAAAAIIIIIIIIAAAAAEEEEEEEEEVVVVVVVFFFFFFFFFFFSSSSSSRRRRRRRRRRRIIIIIIIIWWWWWWWWWWWWWWPPPPPPPKKKKKKKKKFFFFFFFFFFFDDDDDDDDLLLLLLLLMMMMMMMMYYYYYYYYYYYYAAAAAMMMMMMMMRRRRRRRRRRRAAAAAFFFFFFFFFFFVVVVVVVHHHHHHHHHHWWWWWWWWWWWWWWYYYYYYYYYYYYVVVVVVVGGGGEEEEEEEEEGGGGMMMMMMMMEEEEEEEEEEEEEEEEEEGGGGEEEEEEEEEFFFFFFFFFFFSSSSSSEEEEEEEEEAAAAARRRRRRRRRRREEEEEEEEEDDDDDDDDLLLLLLLLAAAAAAAAAALLLLLLLLEEEEEEEEEKKKKKKKKKDDDDDDDDYYYYYYYYYYYYEEEEEEEEEEEEEEEEEEVVVVVVVGGGGIIIIIIIIEEEEEEEEETTTTTTTNNNNNNNNDDDDDDDDGGGGEEEEEEEEEGGGGEEEEEEEEEDDDDDDDDEEEEEEEEEGGGGYYYYYYYYYYYYEEEEEEEEEE

SEQ ID NO: 95 - protein, 3478 aa, Prunus dulcis
MMMMMMMMRRRRRRRRRRREEEEEEEEECCCCCCIIIIIIIISSSSSSIIIIIIIIHHHHHHHHHHIIIIIIIIGGGGQQQQQQQQQAAAAAGGGGIIIIIIIIQQQQQQQQQVVVVVVVGGGGNNNNNNNNAAAAACCCCCCWWWWWWWWWWWWWWEEEEEEEEELLLLLLLLYYYYYYYYYYYYCCCCCCLLLLLLLLEEEEEEEEEHHHHHHHHHHGGGGIIIIIIIIQQQQQQQQQPPPPPPPDDDDDDDDGGGGQQQQQQQQQMMMMMMMMPPPPPPPGGGGDDDDDDDDKKKKKKKKKTTTTTTTVVVVVVVGGGGGGGGGGGGDDDDDDDDDDDDDDDDAAAAAFFFFFFFFFFFNNNNNNNNTTTTTTTFFFFFFFFFFFFFFFFFFFFFFSSSSSSEEEEEEEEETTTTTTTGGGGAAAAAGGGGKKKKKKKKKHHHHHHHHHHVVVVVVVPPPPPPPRRRRRRRRRRRAAAAAVVVVVVVFFFFFFFFFFFVVVVVVVDDDDDDDDLLLLLLLLEEEEEEEEEPPPPPPPTTTTTTTVVVVVVVIIIIIIIIDDDDDDDDEEEEEEEEEVVVVVVVRRRRRRRRRRRTTTTTTTGGGGTTTTTTTYYYYYYYYYYYYRRRRRRRRRRRQQQQQQQQQLLLLLLLLFFFFFFFFFFFHHHHHHHHHHPPPPPPPEEEEEEEEEQQQQQQQQQLLLLLLLLIIIIIIIISSSSSSGGGGKKKKKKKKKEEEEEEEEEDDDDDDDDAAAAAAAAAANNNNNNNNNNNNNNNNFFFFFFFFFFFAAAAARRRRRRRRRRRGGGGHHHHHHHHHHYYYYYYYYYYYYTTTTTTTIIIIIIIIGGGGKKKKKKKKKEEEEEEEEEIIIIIIIIVVVVVVVDDDDDDDDLLLLLLLLCCCCCCLLLLLLLLDDDDDDDDRRRRRRRRRRRIIIIIIIIRRRRRRRRRRRKKKKKKKKKLLLLLLLLAAAAADDDDDDDDNNNNNNNNCCCCCCTTTTTTTGGGGLLLLLLLLQQQQQQQQQGGGGFFFFFFFFFFFLLLLLLLLVVVVVVVFFFFFFFFFFFNNNNNNNNAAAAAVVVVVVVGGGGGGGGGGGGTTTTTTTGGGGSSSSSSGGGGLLLLLLLLGGGGSSSSSSLLLLLLLLLLLLLLLLLLLLLLLLEEEEEEEEERRRRRRRRRRRLLLLLLLLSSSSSSVVVVVVVDDDDDDDDYYYYYYYYYYYYGGGGKKKKKKKKKKKKKKKKKKSSSSSSKKKKKKKKKLLLLLLLLGGGGFFFFFFFFFFFTTTTTTTVVVVVVVYYYYYYYYYYYYPPPPPPPSSSSSSPPPPPPPQQQQQQQQQVVVVVVVSSSSSSTTTTTTTSSSSSSVVVVVVVVVVVVVVEEEEEEEEEPPPPPPPYYYYYYYYYYYYNNNNNNNNSSSSSSVVVVVVVLLLLLLLLSSSSSSTTTTTTTHHHHHHHHHHSSSSSSLLLLLLLLLLLLLLLLEEEEEEEEEHHHHHHHHHHTTTTTTTDDDDDDDDVVVVVVVAAAAAVVVVVVVLLLLLLLLLLLLLLLLDDDDDDDDNNNNNNNNEEEEEEEEEAAAAAIIIIIIIIYYYYYYYYYYYYDDDDDDDDIIIIIIIICCCCCCRRRRRRRRRRRRRRRRRRRRRRSSSSSSLLLLLLLLDDDDDDDDIIIIIIIIEEEEEEEEERRRRRRRRRRRPPPPPPPTTTTTTTYYYYYYYYYYYYTTTTTTTNNNNNNNNLLLLLLLLNNNNNNNNRRRRRRRRRRRLLLLLLLLVVVVVVVSSSSSSQQQQQQQQQVVVVVVVIIIIIIIISSSSSSSSSSSSLLLLLLLLTTTTTTTAAAAASSSSSSLLLLLLLLRRRRRRRRRRRFFFFFFFFFFFDDDDDDDDGGGGAAAAALLLLLLLLNNNNNNNNVVVVVVVDDDDDDDDVVVVVVVTTTTTTTEEEEEEEEEFFFFFFFFFFFQQQQQQQQQTTTTTTTNNNNNNNNLLLLLLLLVVVVVVVPPPPPPPYYYYYYYYYYYYPPPPPPPRRRRRRRRRRRIIIIIIIIHHHHHHHHHHFFFFFFFFFFFMMMMMMMMLLLLLLLLSSSSSSSSSSSSYYYYYYYYYYYYAAAAAPPPPPPPVVVVVVVIIIIIIIISSSSSSAAAAAEEEEEEEEEKKKKKKKKKAAAAAYYYYYYYYYYYYHHHHHHHHHHEEEEEEEEEQQQQQQQQQLLLLLLLLSSSSSSVVVVVVVAAAAAEEEEEEEEEIIIIIIIITTTTTTTNNNNNNNNSSSSSSAAAAAFFFFFFFFFFFEEEEEEEEEPPPPPPPSSSSSSSSSSSSMMMMMMMMMMMMMMMMAAAAAKKKKKKKKKCCCCCCDDDDDDDDPPPPPPPRRRRRRRRRRRHHHHHHHHHHGGGGKKKKKKKKKYYYYYYYYYYYYMMMMMMMMAAAAACCCCCCCCCCCCLLLLLLLLMMMMMMMMYYYYYYYYYYYYRRRRRRRRRRRGGGGDDDDDDDDVVVVVVVVVVVVVVPPPPPPPKKKKKKKKKDDDDDDDDVVVVVVVNNNNNNNNAAAAAAAAAAVVVVVVVAAAAATTTTTTTIIIIIIIIKKKKKKKKKTTTTTTTKKKKKKKKKRRRRRRRRRRRTTTTTTTIIIIIIIIQQQQQQQQQFFFFFFFFFFFVVVVVVVDDDDDDDDWWWWWWWWWWWWWWCCCCCCPPPPPPPTTTTTTTGGGGFFFFFFFFFFFKKKKKKKKKCCCCCCGGGGIIIIIIIINNNNNNNNYYYYYYYYYYYYQQQQQQQQQPPPPPPPPPPPPPPTTTTTTTVVVVVVVVVVVVVVPPPPPPPGGGGGGGGDDDDDDDDLLLLLLLLAAAAAKKKKKKKKKVVVVVVVQQQQQQQQQRRRRRRRRRRRAAAAAVVVVVVVCCCCCCMMMMMMMMIIIIIIIISSSSSSNNNNNNNNSSSSSSTTTTTTTSSSSSSVVVVVVVAAAAAEEEEEEEEEVVVVVVVFFFFFFFFFFFSSSSSSRRRRRRRRRRRIIIIIIIIDDDDDDDDHHHHHHHHHHKKKKKKKKKFFFFFFFFFFFDDDDDDDDLLLLLLLLMMMMMMMMYYYYYYYYYYYYAAAAAKKKKKKKKKRRRRRRRRRRRAAAAAFFFFFFFFFFFVVVVVVVHHHHHHHHHHWWWWWWWWWWWWWWYYYYYYYYYYYYVVVVVVVGGGGEEEEEEEEEGGGGMMMMMMMMEEEEEEEEEEEEEEEEEEGGGGEEEEEEEEEFFFFFFFFFFFSSSSSSEEEEEEEEEAAAAARRRRRRRRRRREEEEEEEEEDDDDDDDDLLLLLLLLAAAAAAAAAALLLLLLLLEEEEEEEEEKKKKKKKKKDDDDDDDDYYYYYYYYYYYYEEEEEEEEEEEEEEEEEEVVVVVVVGGGGAAAAAEEEEEEEEESSSSSSAAAAAEEEEEEEEEGGGGEEEEEEEEEDDDDDDDDDDDDDDDDEEEEEEEEEGGGGDDDDDDDDDDDDDDDDYYYYYYYYYYYYY

SEQ ID NO: 96 - protein, 3499 aa, Sordaria macrospora
MMMMMMMMRRRRRRRRRRREEEEEEEEEIIIIIIIIIIIIIIIISSSSSSLLLLLLLLNNNNNNNNVVVVVVVGGGGQQQQQQQQQAAAAAGGGGCCCCCCQQQQQQQQQIIIIIIIIAAAAANNNNNNNNSSSSSSCCCCCCWWWWWWWWWWWWWWEEEEEEEEELLLLLLLLYYYYYYYYYYYYCCCCCCLLLLLLLLEEEEEEEEEHHHHHHHHHHGGGGIIIIIIIIQQQQQQQQQPPPPPPPDDDDDDDDGGGGYYYYYYYYYYYYLLLLLLLLTTTTTTTEEEEEEEEEEEEEEEEEERRRRRRRRRRRKKKKKKKKKAAAAAAAAAADDDDDDDDPPPPPPPDDDDDDDDHHHHHHHHHHGGGGFFFFFFFFFFFSSSSSSTTTTTTTFFFFFFFFFFFFFFFFFFFFFFSSSSSSEEEEEEEEETTTTTTTGGGGNNNNNNNNGGGGKKKKKKKKKYYYYYYYYYYYYVVVVVVVPPPPPPPRRRRRRRRRRRTTTTTTTIIIIIIIIYYYYYYYYYYYYAAAAADDDDDDDDLLLLLLLLEEEEEEEEEPPPPPPPNNNNNNNNVVVVVVVIIIIIIIIDDDDDDDDEEEEEEEEEVVVVVVVRRRRRRRRRRRTTTTTTTGGGGAAAAAYYYYYYYYYYYYRRRRRRRRRRRGGGGLLLLLLLLFFFFFFFFFFFHHHHHHHHHHPPPPPPPEEEEEEEEEHHHHHHHHHHMMMMMMMMIIIIIIIISSSSSSGGGGKKKKKKKKKEEEEEEEEEDDDDDDDDAAAAASSSSSSNNNNNNNNNNNNNNNNYYYYYYYYYYYYAAAAARRRRRRRRRRRGGGGHHHHHHHHHHYYYYYYYYYYYYTTTTTTTVVVVVVVGGGGKKKKKKKKKEEEEEEEEELLLLLLLLIIIIIIIIDDDDDDDDQQQQQQQQQVVVVVVVLLLLLLLLDDDDDDDDKKKKKKKKKVVVVVVVRRRRRRRRRRRRRRRRRRRRRRVVVVVVVAAAAADDDDDDDDNNNNNNNNCCCCCCSSSSSSGGGGLLLLLLLLQQQQQQQQQGGGGFFFFFFFFFFFLLLLLLLLVVVVVVVFFFFFFFFFFFHHHHHHHHHHSSSSSSFFFFFFFFFFFGGGGGGGGGGGGTTTTTTTGGGGSSSSSSGGGGFFFFFFFFFFFGGGGAAAAALLLLLLLLLLLLLLLLMMMMMMMMEEEEEEEEERRRRRRRRRRRLLLLLLLLSSSSSSVVVVVVVDDDDDDDDYYYYYYYYYYYYGGGGKKKKKKKKKKKKKKKKKKSSSSSSKKKKKKKKKLLLLLLLLEEEEEEEEEFFFFFFFFFFFCCCCCCVVVVVVVYYYYYYYYYYYYPPPPPPPAAAAAPPPPPPPQQQQQQQQQTTTTTTTAAAAATTTTTTTSSSSSSVVVVVVVVVVVVVVEEEEEEEEEPPPPPPPYYYYYYYYYYYYHHHHHHHHHHNNNNNNNNFFFFFFFFFFFLLLLLLLLTTTTTTTTTTTTTTNNNNNNNNTTTTTTTTTTTTTTLLLLLLLLEEEEEEEEEQQQQQQQQQAAAAADDDDDDDDCCCCCCSSSSSSFFFFFFFFFFFMMMMMMMMVVVVVVVDDDDDDDDNNNNNNNNEEEEEEEEEAAAAAIIIIIIIIYYYYYYYYYYYYDDDDDDDDIIIIIIIICCCCCCRRRRRRRRRRRRRRRRRRRRRRNNNNNNNNLLLLLLLLGGGGLLLLLLLLEEEEEEEEERRRRRRRRRRRPPPPPPPNNNNNNNNYYYYYYYYYYYYEEEEEEEEENNNNNNNNLLLLLLLLNNNNNNNNRRRRRRRRRRRLLLLLLLLIIIIIIIIAAAAAQQQQQQQQQVVVVVVVVVVVVVVSSSSSSSSSSSSIIIIIIIITTTTTTTAAAAASSSSSSLLLLLLLLRRRRRRRRRRRFFFFFFFFFFFDDDDDDDDGGGGSSSSSSLLLLLLLLNNNNNNNNVVVVVVVDDDDDDDDLLLLLLLLNNNNNNNNEEEEEEEEEFFFFFFFFFFFQQQQQQQQQTTTTTTTNNNNNNNNLLLLLLLLVVVVVVVPPPPPPPYYYYYYYYYYYYPPPPPPPRRRRRRRRRRRIIIIIIIIHHHHHHHHHHFFFFFFFFFFFPPPPPPPLLLLLLLLVVVVVVVAAAAAYYYYYYYYYYYYAAAAAPPPPPPPVVVVVVVIIIIIIIISSSSSSAAAAAAAAAAKKKKKKKKKAAAAAAAAAAHHHHHHHHHHEEEEEEEEEAAAAANNNNNNNNSSSSSSVVVVVVVQQQQQQQQQEEEEEEEEEMMMMMMMMTTTTTTTMMMMMMMMSSSSSSCCCCCCFFFFFFFFFFFEEEEEEEEEPPPPPPPNNNNNNNNNNNNNNNNQQQQQQQQQMMMMMMMMVVVVVVVKKKKKKKKKCCCCCCDDDDDDDDPPPPPPPRRRRRRRRRRRHHHHHHHHHHGGGGKKKKKKKKKYYYYYYYYYYYYMMMMMMMMAAAAATTTTTTTCCCCCCLLLLLLLLLLLLLLLLYYYYYYYYYYYYGGGGGGGGDDDDDDDDVVVVVVVVVVVVVVPPPPPPPNNNNNNNNDDDDDDDDAAAAAHHHHHHHHHHAAAAAAAAAAVVVVVVVAAAAASSSSSSLLLLLLLLKKKKKKKKKTTTTTTTKKKKKKKKKRRRRRRRRRRRTTTTTTTIIIIIIIIQQQQQQQQQFFFFFFFFFFFVVVVVVVDDDDDDDDWWWWWWWWWWWWWWCCCCCCPPPPPPPTTTTTTTGGGGFFFFFFFFFFFKKKKKKKKKLLLLLLLLGGGGIIIIIIIICCCCCCYYYYYYYYYYYYQQQQQQQQQPPPPPPPPPPPPPPHHHHHHHHHHQQQQQQQQQVVVVVVVPPPPPPPNNNNNNNNGGGGDDDDDDDDLLLLLLLLAAAAAKKKKKKKKKVVVVVVVNNNNNNNNRRRRRRRRRRRAAAAAVVVVVVVCCCCCCMMMMMMMMLLLLLLLLSSSSSSNNNNNNNNTTTTTTTTTTTTTTAAAAAIIIIIIIIAAAAAEEEEEEEEEAAAAAWWWWWWWWWWWWWWSSSSSSAAAAALLLLLLLLSSSSSSSSSSSSKKKKKKKKKFFFFFFFFFFFDDDDDDDDLLLLLLLLMMMMMMMMYYYYYYYYYYYYSSSSSSKKKKKKKKKRRRRRRRRRRRAAAAAFFFFFFFFFFFVVVVVVVHHHHHHHHHHWWWWWWWWWWWWWWYYYYYYYYYYYYVVVVVVVGGGGEEEEEEEEEGGGGMMMMMMMMEEEEEEEEEEEEEEEEEEGGGGEEEEEEEEEFFFFFFFFFFFSSSSSSEEEEEEEEEAAAAARRRRRRRRRRREEEEEEEEEVVVVVVVLLLLLLLLAAAAAAAAAALLLLLLLLEEEEEEEEEAAAAADDDDDDDDYYYYYYYYYYYYEEEEEEEEEEEEEEEEEEVVVVVVVAAAAAAAAAADDDDDDDDSSSSSSMMMMMMMMEEEEEEEEEGGGGEEEEEEEEEEEEEEEEEEVVVVVVVEEEEEEEEEAAAAAEEEEEEEEEYYYYYYYYYYYYY

SEQ ID NO: 97 - protein, 3482 aa, Tetrahymena pyriformis
MMMMMMMMRRRRRRRRRRREEEEEEEEEVVVVVVVIIIIIIIISSSSSSIIIIIIIIHHHHHHHHHHVVVVVVVGGGGQQQQQQQQQGGGGGGGGIIIIIIIIQQQQQQQQQVVVVVVVGGGGNNNNNNNNAAAAACCCCCCWWWWWWWWWWWWWWEEEEEEEEELLLLLLLLFFFFFFFFFFFCCCCCCLLLLLLLLEEEEEEEEEHHHHHHHHHHGGGGIIIIIIIIQQQQQQQQQPPPPPPPDDDDDDDDGGGGQQQQQQQQQMMMMMMMMPPPPPPPSSSSSSDDDDDDDDKKKKKKKKKTTTTTTTIIIIIIIIGGGGGGGGGGGGDDDDDDDDDDDDDDDDAAAAAFFFFFFFFFFFNNNNNNNNTTTTTTTFFFFFFFFFFFFFFFFFFFFFFSSSSSSEEEEEEEEETTTTTTTGGGGAAAAAGGGGKKKKKKKKKHHHHHHHHHHVVVVVVVPPPPPPPRRRRRRRRRRRAAAAAVVVVVVVFFFFFFFFFFFLLLLLLLLDDDDDDDDLLLLLLLLEEEEEEEEEPPPPPPPTTTTTTTVVVVVVVIIIIIIIIDDDDDDDDEEEEEEEEEVVVVVVVRRRRRRRRRRRTTTTTTTGGGGTTTTTTTYYYYYYYYYYYYRRRRRRRRRRRQQQQQQQQQLLLLLLLLFFFFFFFFFFFHHHHHHHHHHPPPPPPPEEEEEEEEEQQQQQQQQQLLLLLLLLIIIIIIIISSSSSSGGGGKKKKKKKKKEEEEEEEEEDDDDDDDDAAAAAAAAAANNNNNNNNNNNNNNNNFFFFFFFFFFFAAAAARRRRRRRRRRRGGGGHHHHHHHHHHYYYYYYYYYYYYTTTTTTTIIIIIIIIGGGGKKKKKKKKKEEEEEEEEEIIIIIIIIVVVVVVVDDDDDDDDLLLLLLLLCCCCCCLLLLLLLLDDDDDDDDRRRRRRRRRRRIIIIIIIIRRRRRRRRRRRKKKKKKKKKLLLLLLLLAAAAADDDDDDDDNNNNNNNNCCCCCCTTTTTTTGGGGLLLLLLLLQQQQQQQQQGGGGFFFFFFFFFFFLLLLLLLLVVVVVVVFFFFFFFFFFFNNNNNNNNSSSSSSVVVVVVVGGGGGGGGGGGGTTTTTTTGGGGSSSSSSGGGGLLLLLLLLGGGGSSSSSSLLLLLLLLLLLLLLLLLLLLLLLLEEEEEEEEERRRRRRRRRRRLLLLLLLLSSSSSSVVVVVVVDDDDDDDDYYYYYYYYYYYYGGGGKKKKKKKKKKKKKKKKKKSSSSSSKKKKKKKKKLLLLLLLLGGGGFFFFFFFFFFFTTTTTTTIIIIIIIIYYYYYYYYYYYYPPPPPPPSSSSSSPPPPPPPQQQQQQQQQVVVVVVVSSSSSSTTTTTTTAAAAAVVVVVVVVVVVVVVEEEEEEEEEPPPPPPPYYYYYYYYYYYYNNNNNNNNSSSSSSIIIIIIIILLLLLLLLSSSSSSTTTTTTTHHHHHHHHHHSSSSSSLLLLLLLLLLLLLLLLEEEEEEEEEHHHHHHHHHHTTTTTTTDDDDDDDDVVVVVVVAAAAAVVVVVVVMMMMMMMMLLLLLLLLDDDDDDDDNNNNNNNNEEEEEEEEEAAAAAIIIIIIIIYYYYYYYYYYYYDDDDDDDDIIIIIIIICCCCCCRRRRRRRRRRRRRRRRRRRRRRNNNNNNNNLLLLLLLLDDDDDDDDIIIIIIIIEEEEEEEEERRRRRRRRRRRPPPPPPPTTTTTTTYYYYYYYYYYYYTTTTTTTNNNNNNNNLLLLLLLLNNNNNNNNRRRRRRRRRRRLLLLLLLLIIIIIIIIAAAAAQQQQQQQQQVVVVVVVIIIIIIIISSSSSSSSSSSSLLLLLLLLTTTTTTTAAAAASSSSSSLLLLLLLLRRRRRRRRRRRFFFFFFFFFFFDDDDDDDDGGGGAAAAALLLLLLLLNNNNNNNNVVVVVVVDDDDDDDDIIIIIIIITTTTTTTEEEEEEEEEFFFFFFFFFFFQQQQQQQQQTTTTTTTNNNNNNNNLLLLLLLLVVVVVVVPPPPPPPYYYYYYYYYYYYPPPPPPPRRRRRRRRRRRIIIIIIIIHHHHHHHHHHFFFFFFFFFFFMMMMMMMMLLLLLLLLSSSSSSSSSSSSYYYYYYYYYYYYAAAAAPPPPPPPIIIIIIIIIIIIIIIISSSSSSAAAAAEEEEEEEEEKKKKKKKKKAAAAAYYYYYYYYYYYYHHHHHHHHHHEEEEEEEEEQQQQQQQQQLLLLLLLLSSSSSSVVVVVVVAAAAAEEEEEEEEEIIIIIIIITTTTTTTNNNNNNNNSSSSSSAAAAAFFFFFFFFFFFEEEEEEEEEPPPPPPPAAAAANNNNNNNNMMMMMMMMMMMMMMMMAAAAAKKKKKKKKKCCCCCCDDDDDDDDPPPPPPPRRRRRRRRRRRHHHHHHHHHHGGGGKKKKKKKKKYYYYYYYYYYYYMMMMMMMMAAAAACCCCCCSSSSSSMMMMMMMMMMMMMMMMYYYYYYYYYYYYRRRRRRRRRRRGGGGDDDDDDDDVVVVVVVVVVVVVVPPPPPPPKKKKKKKKKDDDDDDDDVVVVVVVNNNNNNNNAAAAASSSSSSIIIIIIIIAAAAATTTTTTTIIIIIIIIKKKKKKKKKTTTTTTTKKKKKKKKKRRRRRRRRRRRTTTTTTTIIIIIIIIQQQQQQQQQFFFFFFFFFFFVVVVVVVDDDDDDDDWWWWWWWWWWWWWWCCCCCCPPPPPPPTTTTTTTGGGGFFFFFFFFFFFKKKKKKKKKVVVVVVVGGGGIIIIIIIINNNNNNNNYYYYYYYYYYYYQQQQQQQQQPPPPPPPSSSSSSTTTTTTTVVVVVVVVVVVVVVPPPPPPPGGGGGGGGDDDDDDDDLLLLLLLLAAAAAKKKKKKKKKVVVVVVVMMMMMMMMRRRRRRRRRRRAAAAAVVVVVVVCCCCCCMMMMMMMMIIIIIIIISSSSSSNNNNNNNNSSSSSSTTTTTTTAAAAAIIIIIIIIAAAAAEEEEEEEEEVVVVVVVFFFFFFFFFFFSSSSSSRRRRRRRRRRRLLLLLLLLDDDDDDDDHHHHHHHHHHKKKKKKKKKFFFFFFFFFFFDDDDDDDDLLLLLLLLMMMMMMMMYYYYYYYYYYYYAAAAAKKKKKKKKKRRRRRRRRRRRAAAAAFFFFFFFFFFFVVVVVVVHHHHHHHHHHWWWWWWWWWWWWWWYYYYYYYYYYYYVVVVVVVGGGGEEEEEEEEEGGGGMMMMMMMMEEEEEEEEEEEEEEEEEEGGGGEEEEEEEEEFFFFFFFFFFFSSSSSSEEEEEEEEEAAAAARRRRRRRRRRREEEEEEEEEDDDDDDDDLLLLLLLLAAAAAAAAAALLLLLLLLEEEEEEEEEKKKKKKKKKDDDDDDDDYYYYYYYYYYYYEEEEEEEEEEEEEEEEEEVVVVVVVGGGGIIIIIIIIEEEEEEEEETTTTTTTAAAAAEEEEEEEEEGGGGEEEEEEEEEGGGGEEEEEEEEEEEEEEEEEEEEEEEEEEEGGGGYYYYYYYYYYYYY

SEQ ID NO: 98 - protein, 3483 aa, Tetrahymena thermophila
MMMMMMMMRRRRRRRRRRREEEEEEEEEVVVVVVVIIIIIIIISSSSSSIIIIIIIIHHHHHHHHHHVVVVVVVGGGGQQQQQQQQQGGGGGGGGIIIIIIIIQQQQQQQQQVVVVVVVGGGGNNNNNNNNAAAAACCCCCCWWWWWWWWWWWWWWEEEEEEEEELLLLLLLLFFFFFFFFFFFCCCCCCLLLLLLLLEEEEEEEEEHHHHHHHHHHGGGGIIIIIIIIQQQQQQQQQPPPPPPPDDDDDDDDGGGGQQQQQQQQQMMMMMMMMPPPPPPPSSSSSSDDDDDDDDKKKKKKKKKTTTTTTTIIIIIIIIGGGGGGGGGGGGDDDDDDDDDDDDDDDDAAAAAFFFFFFFFFFFNNNNNNNNTTTTTTTFFFFFFFFFFFFFFFFFFFFFFSSSSSSEEEEEEEEETTTTTTTGGGGAAAAAGGGGKKKKKKKKKHHHHHHHHHHVVVVVVVPPPPPPPRRRRRRRRRRRAAAAAVVVVVVVFFFFFFFFFFFLLLLLLLLDDDDDDDDLLLLLLLLEEEEEEEEEPPPPPPPTTTTTTTVVVVVVVIIIIIIIIDDDDDDDDEEEEEEEEEVVVVVVVRRRRRRRRRRRTTTTTTTGGGGTTTTTTTYYYYYYYYYYYYRRRRRRRRRRRQQQQQQQQQLLLLLLLLFFFFFFFFFFFHHHHHHHHHHPPPPPPPEEEEEEEEEQQQQQQQQQLLLLLLLLIIIIIIIISSSSSSGGGGKKKKKKKKKEEEEEEEEEDDDDDDDDAAAAAAAAAANNNNNNNNNNNNNNNNFFFFFFFFFFFAAAAARRRRRRRRRRRGGGGHHHHHHHHHHYYYYYYYYYYYYTTTTTTTIIIIIIIIGGGGKKKKKKKKKEEEEEEEEEIIIIIIIIVVVVVVVDDDDDDDDLLLLLLLLCCCCCCLLLLLLLLDDDDDDDDRRRRRRRRRRRIIIIIIIIRRRRRRRRRRRKKKKKKKKKLLLLLLLLAAAAADDDDDDDDNNNNNNNNCCCCCCTTTTTTTGGGGLLLLLLLLQQQQQQQQQGGGGFFFFFFFFFFFLLLLLLLLVVVVVVVFFFFFFFFFFFNNNNNNNNSSSSSSVVVVVVVGGGGGGGGGGGGTTTTTTTGGGGSSSSSSGGGGLLLLLLLLGGGGSSSSSSLLLLLLLLLLLLLLLLLLLLLLLLEEEEEEEEERRRRRRRRRRRLLLLLLLLSSSSSSVVVVVVVDDDDDDDDYYYYYYYYYYYYGGGGKKKKKKKKKKKKKKKKKKSSSSSSKKKKKKKKKLLLLLLLLGGGGFFFFFFFFFFFTTTTTTTIIIIIIIIYYYYYYYYYYYYPPPPPPPSSSSSSPPPPPPPQQQQQQQQQVVVVVVVSSSSSSTTTTTTTAAAAAVVVVVVVVVVVVVVEEEEEEEEEPPPPPPPYYYYYYYYYYYYNNNNNNNNSSSSSSIIIIIIIILLLLLLLLSSSSSSTTTTTTTHHHHHHHHHHSSSSSSLLLLLLLLLLLLLLLLEEEEEEEEEHHHHHHHHHHTTTTTTTDDDDDDDDVVVVVVVAAAAAVVVVVVVMMMMMMMMLLLLLLLLDDDDDDDDNNNNNNNNEEEEEEEEEAAAAAIIIIIIIIYYYYYYYYYYYYDDDDDDDDIIIIIIIICCCCCCRRRRRRRRRRRRRRRRRRRRRRNNNNNNNNLLLLLLLLDDDDDDDDIIIIIIIIEEEEEEEEERRRRRRRRRRRPPPPPPPTTTTTTTYYYYYYYYYYYYTTTTTTTNNNNNNNNLLLLLLLLNNNNNNNNRRRRRRRRRRRLLLLLLLLIIIIIIIIAAAAAQQQQQQQQQVVVVVVVIIIIIIIISSSSSSSSSSSSLLLLLLLLTTTTTTTAAAAASSSSSSLLLLLLLLRRRRRRRRRRRFFFFFFFFFFFDDDDDDDDGGGGAAAAALLLLLLLLNNNNNNNNVVVVVVVDDDDDDDDIIIIIIIITTTTTTTEEEEEEEEEFFFFFFFFFFFQQQQQQQQQTTTTTTTNNNNNNNNLLLLLLLLVVVVVVVPPPPPPPYYYYYYYYYYYYPPPPPPPRRRRRRRRRRRIIIIIIIIHHHHHHHHHHFFFFFFFFFFFMMMMMMMMLLLLLLLLSSSSSSSSSSSSYYYYYYYYYYYYAAAAAPPPPPPPIIIIIIIIIIIIIIIISSSSSSAAAAAEEEEEEEEEKKKKKKKKKAAAAAYYYYYYYYYYYYHHHHHHHHHHEEEEEEEEEQQQQQQQQQLLLLLLLLSSSSSSVVVVVVVAAAAAEEEEEEEEEIIIIIIIITTTTTTTNNNNNNNNSSSSSSAAAAAFFFFFFFFFFFEEEEEEEEEPPPPPPPAAAAANNNNNNNNMMMMMMMMMMMMMMMMAAAAAKKKKKKKKKCCCCCCDDDDDDDDPPPPPPPRRRRRRRRRRRHHHHHHHHHHGGGGKKKKKKKKKYYYYYYYYYYYYMMMMMMMMAAAAACCCCCCSSSSSSMMMMMMMMMMMMMMMMYYYYYYYYYYYYRRRRRRRRRRRGGGGDDDDDDDDVVVVVVVVVVVVVVPPPPPPPKKKKKKKKKDDDDDDDDVVVVVVVNNNNNNNNAAAAASSSSSSIIIIIIIIAAAAATTTTTTTIIIIIIIIKKKKKKKKKTTTTTTTKKKKKKKKKRRRRRRRRRRRTTTTTTTIIIIIIIIQQQQQQQQQFFFFFFFFFFFVVVVVVVDDDDDDDDWWWWWWWWWWWWWWCCCCCCPPPPPPPTTTTTTTGGGGFFFFFFFFFFFKKKKKKKKKVVVVVVVGGGGIIIIIIIINNNNNNNNYYYYYYYYYYYYQQQQQQQQQPPPPPPPPPPPPPPTTTTTTTVVVVVVVVVVVVVVPPPPPPPGGGGGGGGDDDDDDDDLLLLLLLLAAAAAKKKKKKKKKVVVVVVVMMMMMMMMRRRRRRRRRRRAAAAAVVVVVVVCCCCCCMMMMMMMMIIIIIIIISSSSSSNNNNNNNNSSSSSSTTTTTTTAAAAAIIIIIIIIAAAAAEEEEEEEEEVVVVVVVFFFFFFFFFFFSSSSSSRRRRRRRRRRRLLLLLLLLDDDDDDDDHHHHHHHHHHKKKKKKKKKFFFFFFFFFFFDDDDDDDDLLLLLLLLMMMMMMMMYYYYYYYYYYYYAAAAAKKKKKKKKKRRRRRRRRRRRAAAAAFFFFFFFFFFFVVVVVVVHHHHHHHHHHWWWWWWWWWWWWWWYYYYYYYYYYYYVVVVVVVGGGGEEEEEEEEEGGGGMMMMMMMMEEEEEEEEEEEEEEEEEEGGGGEEEEEEEEEFFFFFFFFFFFSSSSSSEEEEEEEEEAAAAARRRRRRRRRRREEEEEEEEEDDDDDDDDLLLLLLLLAAAAAAAAAALLLLLLLLEEEEEEEEEKKKKKKKKKDDDDDDDDYYYYYYYYYYYYEEEEEEEEEEEEEEEEEEVVVVVVVGGGGIIIIIIIIEEEEEEEEETTTTTTTAAAAAEEEEEEEEEGGGGEEEEEEEEEGGGGEEEEEEEEEEEEEEEEEEEEEEEEEEEGGGGYYYYYYYYYYYYY

SEQ ID NO: 99 - protein, 3513 aa, Oncorhynchus mykiss
MMMMMMMMRRRRRRRRRRREEEEEEEEECCCCCCIIIIIIIISSSSSSIIIIIIIIHHHHHHHHHHVVVVVVVGGGGQQQQQQQQQAAAAAGGGGVVVVVVVQQQQQQQQQIIIIIIIIGGGGNNNNNNNNAAAAACCCCCCWWWWWWWWWWWWWWEEEEEEEEELLLLLLLLYYYYYYYYYYYYCCCCCCLLLLLLLLEEEEEEEEEHHHHHHHHHHGGGGIIIIIIIIQQQQQQQQQPPPPPPPDDDDDDDDGGGGQQQQQQQQQMMMMMMMMPPPPPPPSSSSSSDDDDDDDDKKKKKKKKKTTTTTTTIIIIIIIIGGGGGGGGGGGGDDDDDDDDDDDDDDDDSSSSSSFFFFFFFFFFFNNNNNNNNTTTTTTTFFFFFFFFFFFFFFFFFFFFFFSSSSSSEEEEEEEEETTTTTTTGGGGAAAAAGGGGKKKKKKKKKHHHHHHHHHHVVVVVVVPPPPPPPRRRRRRRRRRRAAAAAVVVVVVVFFFFFFFFFFFVVVVVVVDDDDDDDDLLLLLLLLEEEEEEEEEPPPPPPPTTTTTTTVVVVVVVVVVVVVVDDDDDDDDEEEEEEEEEVVVVVVVRRRRRRRRRRRTTTTTTTGGGGTTTTTTTYYYYYYYYYYYYRRRRRRRRRRRQQQQQQQQQLLLLLLLLFFFFFFFFFFFHHHHHHHHHHPPPPPPPEEEEEEEEEQQQQQQQQQLLLLLLLLIIIIIIIITTTTTTTGGGGKKKKKKKKKEEEEEEEEEDDDDDDDDAAAAAAAAAANNNNNNNNNNNNNNNNYYYYYYYYYYYYAAAAARRRRRRRRRRRGGGGHHHHHHHHHHYYYYYYYYYYYYTTTTTTTIIIIIIIIGGGGKKKKKKKKKEEEEEEEEEIIIIIIIIVVVVVVVDDDDDDDDLLLLLLLLVVVVVVVLLLLLLLLDDDDDDDDRRRRRRRRRRRVVVVVVVRRRRRRRRRRRKKKKKKKKKLLLLLLLLSSSSSSDDDDDDDDQQQQQQQQQCCCCCCTTTTTTTGGGGLLLLLLLLQQQQQQQQQGGGGFFFFFFFFFFFLLLLLLLLIIIIIIIIFFFFFFFFFFFHHHHHHHHHHSSSSSSFFFFFFFFFFFGGGGGGGGGGGGTTTTTTTGGGGSSSSSSGGGGFFFFFFFFFFFAAAAASSSSSSLLLLLLLLLLLLLLLLMMMMMMMMEEEEEEEEERRRRRRRRRRRLLLLLLLLSSSSSSVVVVVVVDDDDDDDDYYYYYYYYYYYYGGGGKKKKKKKKKKKKKKKKKKSSSSSSKKKKKKKKKLLLLLLLLEEEEEEEEEFFFFFFFFFFFAAAAAIIIIIIIIYYYYYYYYYYYYPPPPPPPAAAAAPPPPPPPQQQQQQQQQVVVVVVVSSSSSSTTTTTTTAAAAAVVVVVVVVVVVVVVEEEEEEEEEPPPPPPPYYYYYYYYYYYYNNNNNNNNSSSSSSIIIIIIIILLLLLLLLTTTTTTTTTTTTTTHHHHHHHHHHTTTTTTTTTTTTTTLLLLLLLLEEEEEEEEEHHHHHHHHHHSSSSSSDDDDDDDDCCCCCCAAAAAFFFFFFFFFFFMMMMMMMMVVVVVVVDDDDDDDDNNNNNNNNEEEEEEEEEAAAAAIIIIIIIIYYYYYYYYYYYYDDDDDDDDIIIIIIIICCCCCCRRRRRRRRRRRRRRRRRRRRRRNNNNNNNNLLLLLLLLDDDDDDDDIIIIIIIIEEEEEEEEERRRRRRRRRRRPPPPPPPTTTTTTTYYYYYYYYYYYYTTTTTTTNNNNNNNNLLLLLLLLNNNNNNNNRRRRRRRRRRRLLLLLLLLIIIIIIIIGGGGQQQQQQQQQIIIIIIIIVVVVVVVSSSSSSSSSSSSIIIIIIIITTTTTTTAAAAASSSSSSLLLLLLLLRRRRRRRRRRRFFFFFFFFFFFDDDDDDDDGGGGAAAAALLLLLLLLNNNNNNNNVVVVVVVDDDDDDDDLLLLLLLLTTTTTTTEEEEEEEEEFFFFFFFFFFFQQQQQQQQQTTTTTTTNNNNNNNNLLLLLLLLVVVVVVVPPPPPPPYYYYYYYYYYYYPPPPPPPRRRRRRRRRRRIIIIIIIIHHHHHHHHHHFFFFFFFFFFFPPPPPPPLLLLLLLLVVVVVVVTTTTTTTYYYYYYYYYYYYAAAAAPPPPPPPVVVVVVVIIIIIIIISSSSSSAAAAAEEEEEEEEEKKKKKKKKKAAAAAYYYYYYYYYYYYHHHHHHHHHHEEEEEEEEEMMMMMMMMLLLLLLLLSSSSSSVVVVVVVAAAAAEEEEEEEEEIIIIIIIITTTTTTTNNNNNNNNAAAAACCCCCCFFFFFFFFFFFEEEEEEEEEPPPPPPPAAAAANNNNNNNNQQQQQQQQQMMMMMMMMVVVVVVVKKKKKKKKKCCCCCCDDDDDDDDPPPPPPPRRRRRRRRRRRHHHHHHHHHHGGGGKKKKKKKKKYYYYYYYYYYYYMMMMMMMMAAAAACCCCCCCCCCCCMMMMMMMMLLLLLLLLYYYYYYYYYYYYRRRRRRRRRRRGGGGDDDDDDDDVVVVVVVVVVVVVVPPPPPPPKKKKKKKKKDDDDDDDDVVVVVVVNNNNNNNNAAAAAAAAAAIIIIIIIIAAAAATTTTTTTIIIIIIIIKKKKKKKKKTTTTTTTKKKKKKKKKRRRRRRRRRRRTTTTTTTIIIIIIIIQQQQQQQQQFFFFFFFFFFFVVVVVVVDDDDDDDDWWWWWWWWWWWWWWCCCCCCPPPPPPPTTTTTTTGGGGFFFFFFFFFFFKKKKKKKKKVVVVVVVGGGGIIIIIIIINNNNNNNNYYYYYYYYYYYYQQQQQQQQQPPPPPPPPPPPPPPTTTTTTTVVVVVVVVVVVVVVPPPPPPPGGGGGGGGDDDDDDDDLLLLLLLLAAAAAKKKKKKKKKVVVVVVVQQQQQQQQQRRRRRRRRRRRAAAAAVVVVVVVCCCCCCMMMMMMMMLLLLLLLLSSSSSSNNNNNNNNTTTTTTTTTTTTTTAAAAAIIIIIIIIAAAAAEEEEEEEEEAAAAAWWWWWWWWWWWWWWAAAAARRRRRRRRRRRLLLLLLLLDDDDDDDDHHHHHHHHHHKKKKKKKKKFFFFFFFFFFFDDDDDDDDLLLLLLLLMMMMMMMMYYYYYYYYYYYYAAAAAKKKKKKKKKRRRRRRRRRRRAAAAAFFFFFFFFFFFVVVVVVVHHHHHHHHHHWWWWWWWWWWWWWWYYYYYYYYYYYYVVVVVVVGGGGEEEEEEEEEGGGGMMMMMMMMEEEEEEEEEEEEEEEEEEGGGGEEEEEEEEEFFFFFFFFFFFSSSSSSEEEEEEEEEAAAAARRRRRRRRRRREEEEEEEEEDDDDDDDDLLLLLLLLAAAAAAAAAALLLLLLLLEEEEEEEEEKKKKKKKKKDDDDDDDDYYYYYYYYYYYYEEEEEEEEEEEEEEEEEEVVVVVVVGGGGVVVVVVVDDDDDDDDSSSSSSVVVVVVVEEEEEEEEEGGGGEEEEEEEEEAAAAAEEEEEEEEEEEEEEEEEEGGGGEEEEEEEEEEEEEEEEEEYYYYYYYYYYYYY

SEQ ID NO: 100 - protein, 3526 aa, Torpedo marmorata
MMMMMMMMRRRRRRRRRRREEEEEEEEECCCCCCIIIIIIIISSSSSSIIIIIIIIHHHHHHHHHHVVVVVVVGGGGQQQQQQQQQAAAAAGGGGVVVVVVVQQQQQQQQQIIIIIIIIGGGGNNNNNNNNAAAAACCCCCCWWWWWWWWWWWWWWEEEEEEEEELLLLLLLLYYYYYYYYYYYYCCCCCCLLLLLLLLEEEEEEEEEHHHHHHHHHHGGGGIIIIIIIIQQQQQQQQQPPPPPPPDDDDDDDDGGGGQQQQQQQQQMMMMMMMMPPPPPPPSSSSSSDDDDDDDDKKKKKKKKKTTTTTTTIIIIIIIIGGGGGGGGGGGGDDDDDDDDDDDDDDDDSSSSSSFFFFFFFFFFFNNNNNNNNTTTTTTTFFFFFFFFFFFFFFFFFFFFFFSSSSSSEEEEEEEEETTTTTTTGGGGAAAAAGGGGKKKKKKKKKHHHHHHHHHHVVVVVVVPPPPPPPRRRRRRRRRRRAAAAAVVVVVVVFFFFFFFFFFFVVVVVVVDDDDDDDDLLLLLLLLEEEEEEEEEPPPPPPPTTTTTTTVVVVVVVIIIIIIIIDDDDDDDDEEEEEEEEEVVVVVVVRRRRRRRRRRRTTTTTTTGGGGTTTTTTTYYYYYYYYYYYYRRRRRRRRRRRQQQQQQQQQLLLLLLLLFFFFFFFFFFFHHHHHHHHHHPPPPPPPEEEEEEEEEQQQQQQQQQLLLLLLLLIIIIIIIITTTTTTTGGGGKKKKKKKKKEEEEEEEEEDDDDDDDDAAAAAAAAAANNNNNNNNNNNNNNNNYYYYYYYYYYYYAAAAARRRRRRRRRRRGGGGHHHHHHHHHHYYYYYYYYYYYYTTTTTTTIIIIIIIIGGGGKKKKKKKKKEEEEEEEEEIIIIIIIIIIIIIIIIDDDDDDDDLLLLLLLLVVVVVVVLLLLLLLLDDDDDDDDRRRRRRRRRRRIIIIIIIIRRRRRRRRRRRKKKKKKKKKLLLLLLLLAAAAADDDDDDDDQQQQQQQQQCCCCCCTTTTTTTGGGGLLLLLLLLQQQQQQQQQGGGGFFFFFFFFFFFLLLLLLLLVVVVVVVFFFFFFFFFFFHHHHHHHHHHSSSSSSFFFFFFFFFFFGGGGGGGGGGGGTTTTTTTGGGGSSSSSSGGGGFFFFFFFFFFFTTTTTTTSSSSSSLLLLLLLLLLLLLLLLMMMMMMMMEEEEEEEEERRRRRRRRRRRLLLLLLLLSSSSSSVVVVVVVDDDDDDDDYYYYYYYYYYYYGGGGKKKKKKKKKKKKKKKKKKSSSSSSKKKKKKKKKLLLLLLLLEEEEEEEEEFFFFFFFFFFFSSSSSSIIIIIIIIYYYYYYYYYYYYPPPPPPPAAAAAPPPPPPPQQQQQQQQQVVVVVVVSSSSSSTTTTTTTAAAAAVVVVVVVVVVVVVVEEEEEEEEEPPPPPPPYYYYYYYYYYYYNNNNNNNNSSSSSSIIIIIIIILLLLLLLLTTTTTTTTTTTTTTHHHHHHHHHHTTTTTTTTTTTTTTLLLLLLLLEEEEEEEEEHHHHHHHHHHSSSSSSDDDDDDDDCCCCCCAAAAAFFFFFFFFFFFMMMMMMMMVVVVVVVDDDDDDDDNNNNNNNNEEEEEEEEEAAAAAIIIIIIIIYYYYYYYYYYYYDDDDDDDDIIIIIIIICCCCCCRRRRRRRRRRRRRRRRRRRRRRNNNNNNNNLLLLLLLLDDDDDDDDIIIIIIIIEEEEEEEEERRRRRRRRRRRPPPPPPPTTTTTTTYYYYYYYYYYYYTTTTTTTNNNNNNNNLLLLLLLLNNNNNNNNRRRRRRRRRRRLLLLLLLLIIIIIIIISSSSSSQQQQQQQQQIIIIIIIIVVVVVVVSSSSSSSSSSSSIIIIIIIITTTTTTTAAAAASSSSSSLLLLLLLLRRRRRRRRRRRFFFFFFFFFFFDDDDDDDDGGGGAAAAALLLLLLLLNNNNNNNNVVVVVVVDDDDDDDDLLLLLLLLTTTTTTTEEEEEEEEEFFFFFFFFFFFQQQQQQQQQTTTTTTTNNNNNNNNLLLLLLLLVVVVVVVPPPPPPPYYYYYYYYYYYYPPPPPPPRRRRRRRRRRRIIIIIIIIHHHHHHHHHHFFFFFFFFFFFPPPPPPPLLLLLLLLAAAAATTTTTTTYYYYYYYYYYYYAAAAAPPPPPPPVVVVVVVIIIIIIIISSSSSSAAAAAEEEEEEEEEKKKKKKKKKAAAAAYYYYYYYYYYYYHHHHHHHHHHEEEEEEEEEQQQQQQQQQLLLLLLLLSSSSSSVVVVVVVSSSSSSEEEEEEEEEIIIIIIIITTTTTTTNNNNNNNNAAAAACCCCCCFFFFFFFFFFFEEEEEEEEEPPPPPPPAAAAANNNNNNNNQQQQQQQQQMMMMMMMMVVVVVVVKKKKKKKKKCCCCCCDDDDDDDDPPPPPPPRRRRRRRRRRRHHHHHHHHHHGGGGKKKKKKKKKYYYYYYYYYYYYMMMMMMMMAAAAACCCCCCCCCCCCLLLLLLLLLLLLLLLLYYYYYYYYYYYYRRRRRRRRRRRGGGGDDDDDDDDVVVVVVVVVVVVVVPPPPPPPKKKKKKKKKDDDDDDDDVVVVVVVNNNNNNNNAAAAAAAAAAIIIIIIIIAAAAATTTTTTTIIIIIIIIKKKKKKKKKTTTTTTTKKKKKKKKKRRRRRRRRRRRSSSSSSIIIIIIIIQQQQQQQQQFFFFFFFFFFFVVVVVVVDDDDDDDDWWWWWWWWWWWWWWCCCCCCPPPPPPPTTTTTTTGGGGFFFFFFFFFFFKKKKKKKKKVVVVVVVGGGGIIIIIIIINNNNNNNNYYYYYYYYYYYYQQQQQQQQQPPPPPPPPPPPPPPTTTTTTTVVVVVVVVVVVVVVPPPPPPPGGGGGGGGDDDDDDDDLLLLLLLLAAAAAKKKKKKKKKVVVVVVVQQQQQQQQQRRRRRRRRRRRAAAAAVVVVVVVCCCCCCMMMMMMMMLLLLLLLLSSSSSSNNNNNNNNTTTTTTTTTTTTTTAAAAAIIIIIIIIAAAAAEEEEEEEEEAAAAAWWWWWWWWWWWWWWAAAAARRRRRRRRRRRLLLLLLLLDDDDDDDDHHHHHHHHHHKKKKKKKKKFFFFFFFFFFFDDDDDDDDLLLLLLLLMMMMMMMMYYYYYYYYYYYYAAAAAKKKKKKKKKRRRRRRRRRRRAAAAAFFFFFFFFFFFVVVVVVVHHHHHHHHHHWWWWWWWWWWWWWWYYYYYYYYYYYYVVVVVVVGGGGEEEEEEEEEGGGGMMMMMMMMEEEEEEEEEEEEEEEEEEGGGGEEEEEEEEEFFFFFFFFFFFSSSSSSEEEEEEEEEAAAAARRRRRRRRRRREEEEEEEEEDDDDDDDDMMMMMMMMAAAAAAAAAALLLLLLLLEEEEEEEEEKKKKKKKKKDDDDDDDDYYYYYYYYYYYYEEEEEEEEEEEEEEEEEEVVVVVVVGGGGVVVVVVVDDDDDDDDSSSSSSVVVVVVVEEEEEEEEEGGGGEEEEEEEEEGGGGEEEEEEEEEEEEEEEEEEEEEEEEEEEGGGGEEEEEEEEEEEEEEEEEEYYYYYYYYYYYYY

SEQ ID NO: 101 - protein, 3515 aa, Toxoplasma gondii
MMMMMMMMRRRRRRRRRRREEEEEEEEEVVVVVVVIIIIIIIISSSSSSIIIIIIIIHHHHHHHHHHVVVVVVVGGGGQQQQQQQQQAAAAAGGGGIIIIIIIIQQQQQQQQQIIIIIIIIGGGGNNNNNNNNAAAAACCCCCCWWWWWWWWWWWWWWEEEEEEEEELLLLLLLLFFFFFFFFFFFCCCCCCLLLLLLLLEEEEEEEEEHHHHHHHHHHGGGGIIIIIIIIQQQQQQQQQPPPPPPPDDDDDDDDGGGGQQQQQQQQQMMMMMMMMPPPPPPPSSSSSSDDDDDDDDKKKKKKKKKTTTTTTTIIIIIIIIGGGGGGGGGGGGDDDDDDDDDDDDDDDDAAAAAFFFFFFFFFFFNNNNNNNNTTTTTTTFFFFFFFFFFFFFFFFFFFFFFSSSSSSEEEEEEEEETTTTTTTGGGGAAAAAGGGGKKKKKKKKKHHHHHHHHHHVVVVVVVPPPPPPPRRRRRRRRRRRCCCCCCVVVVVVVFFFFFFFFFFFLLLLLLLLDDDDDDDDLLLLLLLLEEEEEEEEEPPPPPPPTTTTTTTVVVVVVVVVVVVVVDDDDDDDDEEEEEEEEEVVVVVVVRRRRRRRRRRRTTTTTTTGGGGTTTTTTTYYYYYYYYYYYYRRRRRRRRRRRHHHHHHHHHHLLLLLLLLFFFFFFFFFFFHHHHHHHHHHPPPPPPPEEEEEEEEEQQQQQQQQQLLLLLLLLIIIIIIIISSSSSSGGGGKKKKKKKKKEEEEEEEEEDDDDDDDDAAAAAAAAAANNNNNNNNNNNNNNNNFFFFFFFFFFFAAAAARRRRRRRRRRRGGGGHHHHHHHHHHYYYYYYYYYYYYTTTTTTTIIIIIIIIGGGGKKKKKKKKKEEEEEEEEEIIIIIIIIVVVVVVVDDDDDDDDLLLLLLLLSSSSSSLLLLLLLLDDDDDDDDRRRRRRRRRRRIIIIIIIIRRRRRRRRRRRKKKKKKKKKLLLLLLLLAAAAADDDDDDDDNNNNNNNNCCCCCCTTTTTTTGGGGLLLLLLLLQQQQQQQQQGGGGFFFFFFFFFFFLLLLLLLLMMMMMMMMFFFFFFFFFFFNNNNNNNNAAAAAVVVVVVVGGGGGGGGGGGGTTTTTTTGGGGSSSSSSGGGGLLLLLLLLGGGGCCCCCCLLLLLLLLLLLLLLLLLLLLLLLLEEEEEEEEERRRRRRRRRRRLLLLLLLLSSSSSSVVVVVVVDDDDDDDDYYYYYYYYYYYYGGGGKKKKKKKKKKKKKKKKKKSSSSSSKKKKKKKKKLLLLLLLLNNNNNNNNFFFFFFFFFFFCCCCCCSSSSSSWWWWWWWWWWWWWWPPPPPPPSSSSSSPPPPPPPQQQQQQQQQVVVVVVVSSSSSSTTTTTTTAAAAAVVVVVVVVVVVVVVEEEEEEEEEPPPPPPPYYYYYYYYYYYYNNNNNNNNSSSSSSVVVVVVVLLLLLLLLSSSSSSTTTTTTTHHHHHHHHHHSSSSSSLLLLLLLLLLLLLLLLEEEEEEEEEHHHHHHHHHHTTTTTTTDDDDDDDDVVVVVVVAAAAAVVVVVVVMMMMMMMMLLLLLLLLDDDDDDDDNNNNNNNNEEEEEEEEEAAAAAIIIIIIIIYYYYYYYYYYYYDDDDDDDDIIIIIIIICCCCCCRRRRRRRRRRRRRRRRRRRRRRNNNNNNNNLLLLLLLLDDDDDDDDIIIIIIIIEEEEEEEEERRRRRRRRRRRPPPPPPPTTTTTTTYYYYYYYYYYYYTTTTTTTNNNNNNNNLLLLLLLLNNNNNNNNRRRRRRRRRRRLLLLLLLLIIIIIIIIAAAAAQQQQQQQQQVVVVVVVIIIIIIIISSSSSSSSSSSSLLLLLLLLTTTTTTTAAAAASSSSSSLLLLLLLLRRRRRRRRRRRFFFFFFFFFFFDDDDDDDDGGGGAAAAALLLLLLLLNNNNNNNNVVVVVVVDDDDDDDDVVVVVVVTTTTTTTEEEEEEEEEFFFFFFFFFFFQQQQQQQQQTTTTTTTNNNNNNNNLLLLLLLLVVVVVVVPPPPPPPYYYYYYYYYYYYPPPPPPPRRRRRRRRRRRIIIIIIIIHHHHHHHHHHFFFFFFFFFFFMMMMMMMMLLLLLLLLSSSSSSSSSSSSYYYYYYYYYYYYAAAAAPPPPPPPIIIIIIIIIIIIIIIISSSSSSAAAAAEEEEEEEEEKKKKKKKKKAAAAAYYYYYYYYYYYYHHHHHHHHHHEEEEEEEEEQQQQQQQQQLLLLLLLLSSSSSSVVVVVVVAAAAAEEEEEEEEEIIIIIIIITTTTTTTNNNNNNNNSSSSSSAAAAAFFFFFFFFFFFEEEEEEEEEPPPPPPPAAAAASSSSSSMMMMMMMMMMMMMMMMAAAAAKKKKKKKKKCCCCCCDDDDDDDDPPPPPPPRRRRRRRRRRRHHHHHHHHHHGGGGKKKKKKKKKYYYYYYYYYYYYMMMMMMMMAAAAACCCCCCCCCCCCLLLLLLLLMMMMMMMMYYYYYYYYYYYYRRRRRRRRRRRGGGGDDDDDDDDVVVVVVVVVVVVVVPPPPPPPKKKKKKKKKDDDDDDDDVVVVVVVNNNNNNNNAAAAAAAAAAVVVVVVVAAAAATTTTTTTIIIIIIIIKKKKKKKKKTTTTTTTKKKKKKKKKRRRRRRRRRRRTTTTTTTIIIIIIIIQQQQQQQQQFFFFFFFFFFFVVVVVVVDDDDDDDDWWWWWWWWWWWWWWCCCCCCPPPPPPPTTTTTTTGGGGFFFFFFFFFFFKKKKKKKKKCCCCCCGGGGIIIIIIIINNNNNNNNYYYYYYYYYYYYQQQQQQQQQPPPPPPPPPPPPPPTTTTTTTVVVVVVVVVVVVVVPPPPPPPGGGGGGGGDDDDDDDDLLLLLLLLAAAAAKKKKKKKKKVVVVVVVMMMMMMMMRRRRRRRRRRRAAAAAVVVVVVVCCCCCCMMMMMMMMIIIIIIIISSSSSSNNNNNNNNSSSSSSTTTTTTTAAAAAIIIIIIIIAAAAAEEEEEEEEEVVVVVVVFFFFFFFFFFFSSSSSSRRRRRRRRRRRMMMMMMMMDDDDDDDDHHHHHHHHHHKKKKKKKKKFFFFFFFFFFFDDDDDDDDLLLLLLLLMMMMMMMMYYYYYYYYYYYYAAAAAKKKKKKKKKRRRRRRRRRRRAAAAAFFFFFFFFFFFVVVVVVVHHHHHHHHHHWWWWWWWWWWWWWWYYYYYYYYYYYYVVVVVVVGGGGEEEEEEEEEGGGGMMMMMMMMEEEEEEEEEEEEEEEEEEGGGGEEEEEEEEEFFFFFFFFFFFSSSSSSEEEEEEEEEAAAAARRRRRRRRRRREEEEEEEEEDDDDDDDDLLLLLLLLAAAAAAAAAALLLLLLLLEEEEEEEEEKKKKKKKKKDDDDDDDDYYYYYYYYYYYYEEEEEEEEEEEEEEEEEEVVVVVVVGGGGIIIIIIIIEEEEEEEEETTTTTTTAAAAAEEEEEEEEEGGGGEEEEEEEEEGGGGEEEEEEEEEEEEEEEEEEEEEEEEEEEGGGGYYYYYYYYYYYYGGGGDDDDDDDDEEEEEEEEEYYYYYYYYYYYYY

SEQ ID NO: 102 - protein, 3497 aa, Trypanosoma brucei
MMMMMMMMRRRRRRRRRRREEEEEEEEEAAAAAIIIIIIIICCCCCCIIIIIIIIHHHHHHHHHHIIIIIIIIGGGGQQQQQQQQQAAAAAGGGGCCCCCCQQQQQQQQQVVVVVVVGGGGNNNNNNNNAAAAACCCCCCWWWWWWWWWWWWWWEEEEEEEEELLLLLLLLFFFFFFFFFFFCCCCCCLLLLLLLLEEEEEEEEEHHHHHHHHHHGGGGIIIIIIIIQQQQQQQQQPPPPPPPDDDDDDDDGGGGAAAAAMMMMMMMMPPPPPPPSSSSSSDDDDDDDDKKKKKKKKKTTTTTTTIIIIIIIIGGGGVVVVVVVEEEEEEEEEDDDDDDDDDDDDDDDDAAAAAFFFFFFFFFFFNNNNNNNNTTTTTTTFFFFFFFFFFFFFFFFFFFFFFSSSSSSEEEEEEEEETTTTTTTGGGGAAAAAGGGGKKKKKKKKKHHHHHHHHHHVVVVVVVPPPPPPPRRRRRRRRRRRAAAAAVVVVVVVFFFFFFFFFFFLLLLLLLLDDDDDDDDLLLLLLLLEEEEEEEEEPPPPPPPTTTTTTTVVVVVVVVVVVVVVDDDDDDDDEEEEEEEEEVVVVVVVRRRRRRRRRRRTTTTTTTGGGGTTTTTTTYYYYYYYYYYYYRRRRRRRRRRRQQQQQQQQQLLLLLLLLFFFFFFFFFFFHHHHHHHHHHPPPPPPPEEEEEEEEEQQQQQQQQQLLLLLLLLIIIIIIIISSSSSSGGGGKKKKKKKKKEEEEEEEEEDDDDDDDDAAAAAAAAAANNNNNNNNNNNNNNNNYYYYYYYYYYYYAAAAARRRRRRRRRRRGGGGHHHHHHHHHHYYYYYYYYYYYYTTTTTTTIIIIIIIIGGGGKKKKKKKKKEEEEEEEEEIIIIIIIIVVVVVVVDDDDDDDDLLLLLLLLCCCCCCLLLLLLLLDDDDDDDDRRRRRRRRRRRIIIIIIIIRRRRRRRRRRRKKKKKKKKKLLLLLLLLAAAAADDDDDDDDNNNNNNNNCCCCCCTTTTTTTGGGGLLLLLLLLQQQQQQQQQGGGGFFFFFFFFFFFLLLLLLLLVVVVVVVYYYYYYYYYYYYHHHHHHHHHHAAAAAVVVVVVVGGGGGGGGGGGGTTTTTTTGGGGSSSSSSGGGGLLLLLLLLGGGGAAAAALLLLLLLLLLLLLLLLLLLLLLLLEEEEEEEEERRRRRRRRRRRLLLLLLLLSSSSSSVVVVVVVDDDDDDDDYYYYYYYYYYYYGGGGKKKKKKKKKKKKKKKKKKSSSSSSKKKKKKKKKLLLLLLLLGGGGYYYYYYYYYYYYTTTTTTTVVVVVVVYYYYYYYYYYYYPPPPPPPSSSSSSPPPPPPPQQQQQQQQQVVVVVVVSSSSSSTTTTTTTAAAAAVVVVVVVVVVVVVVEEEEEEEEEPPPPPPPYYYYYYYYYYYYNNNNNNNNSSSSSSVVVVVVVLLLLLLLLSSSSSSTTTTTTTHHHHHHHHHHSSSSSSLLLLLLLLLLLLLLLLEEEEEEEEEHHHHHHHHHHTTTTTTTDDDDDDDDVVVVVVVAAAAAAAAAAMMMMMMMMLLLLLLLLDDDDDDDDNNNNNNNNEEEEEEEEEAAAAAIIIIIIIIYYYYYYYYYYYYDDDDDDDDLLLLLLLLTTTTTTTRRRRRRRRRRRRRRRRRRRRRRNNNNNNNNLLLLLLLLDDDDDDDDIIIIIIIIEEEEEEEEERRRRRRRRRRRPPPPPPPTTTTTTTYYYYYYYYYYYYTTTTTTTNNNNNNNNLLLLLLLLNNNNNNNNRRRRRRRRRRRLLLLLLLLIIIIIIIIGGGGQQQQQQQQQVVVVVVVVVVVVVVSSSSSSSSSSSSLLLLLLLLTTTTTTTAAAAASSSSSSLLLLLLLLRRRRRRRRRRRFFFFFFFFFFFDDDDDDDDGGGGAAAAALLLLLLLLNNNNNNNNVVVVVVVDDDDDDDDLLLLLLLLTTTTTTTEEEEEEEEEFFFFFFFFFFFQQQQQQQQQTTTTTTTNNNNNNNNLLLLLLLLVVVVVVVPPPPPPPYYYYYYYYYYYYPPPPPPPRRRRRRRRRRRIIIIIIIIHHHHHHHHHHFFFFFFFFFFFVVVVVVVLLLLLLLLTTTTTTTSSSSSSYYYYYYYYYYYYAAAAAPPPPPPPVVVVVVVIIIIIIIISSSSSSAAAAAEEEEEEEEEKKKKKKKKKAAAAAYYYYYYYYYYYYHHHHHHHHHHEEEEEEEEEQQQQQQQQQLLLLLLLLSSSSSSVVVVVVVSSSSSSEEEEEEEEEIIIIIIIISSSSSSNNNNNNNNAAAAAVVVVVVVFFFFFFFFFFFEEEEEEEEEPPPPPPPAAAAASSSSSSMMMMMMMMMMMMMMMMTTTTTTTKKKKKKKKKCCCCCCDDDDDDDDPPPPPPPRRRRRRRRRRRHHHHHHHHHHGGGGKKKKKKKKKYYYYYYYYYYYYMMMMMMMMAAAAACCCCCCCCCCCCLLLLLLLLMMMMMMMMYYYYYYYYYYYYRRRRRRRRRRRGGGGDDDDDDDDVVVVVVVVVVVVVVPPPPPPPKKKKKKKKKDDDDDDDDVVVVVVVNNNNNNNNAAAAAAAAAAVVVVVVVAAAAATTTTTTTIIIIIIIIKKKKKKKKKTTTTTTTKKKKKKKKKRRRRRRRRRRRTTTTTTTIIIIIIIIQQQQQQQQQFFFFFFFFFFFVVVVVVVDDDDDDDDWWWWWWWWWWWWWWSSSSSSPPPPPPPTTTTTTTGGGGFFFFFFFFFFFKKKKKKKKKCCCCCCGGGGIIIIIIIINNNNNNNNYYYYYYYYYYYYQQQQQQQQQPPPPPPPPPPPPPPTTTTTTTVVVVVVVVVVVVVVPPPPPPPGGGGGGGGDDDDDDDDLLLLLLLLAAAAAKKKKKKKKKVVVVVVVQQQQQQQQQRRRRRRRRRRRAAAAAVVVVVVVCCCCCCMMMMMMMMIIIIIIIIAAAAANNNNNNNNSSSSSSTTTTTTTAAAAAIIIIIIIIAAAAAEEEEEEEEEVVVVVVVFFFFFFFFFFFAAAAARRRRRRRRRRRIIIIIIIIDDDDDDDDHHHHHHHHHHKKKKKKKKKFFFFFFFFFFFDDDDDDDDLLLLLLLLMMMMMMMMYYYYYYYYYYYYSSSSSSKKKKKKKKKRRRRRRRRRRRAAAAAFFFFFFFFFFFVVVVVVVHHHHHHHHHHWWWWWWWWWWWWWWYYYYYYYYYYYYVVVVVVVGGGGEEEEEEEEEGGGGMMMMMMMMEEEEEEEEEEEEEEEEEEGGGGEEEEEEEEEFFFFFFFFFFFSSSSSSEEEEEEEEEAAAAARRRRRRRRRRREEEEEEEEEDDDDDDDDLLLLLLLLAAAAAAAAAALLLLLLLLEEEEEEEEEKKKKKKKKKDDDDDDDDYYYYYYYYYYYYEEEEEEEEEEEEEEEEEEVVVVVVVGGGGAAAAAEEEEEEEEESSSSSSAAAAADDDDDDDDMMMMMMMMDDDDDDDDGGGGEEEEEEEEEEEEEEEEEEDDDDDDDDVVVVVVVEEEEEEEEEEEEEEEEEEYYYYYYYYYYYYY

SEQ ID NO: 103 - protein, 3493 aa, Trypanosoma cruzi
MMMMMMMMRRRRRRRRRRREEEEEEEEEAAAAAIIIIIIIICCCCCCIIIIIIIIHHHHHHHHHHIIIIIIIIGGGGQQQQQQQQQAAAAAGGGGCCCCCCQQQQQQQQQVVVVVVVGGGGNNNNNNNNAAAAACCCCCCWWWWWWWWWWWWWWEEEEEEEEELLLLLLLLFFFFFFFFFFFCCCCCCLLLLLLLLEEEEEEEEEHHHHHHHHHHGGGGIIIIIIIIQQQQQQQQQPPPPPPPDDDDDDDDGGGGAAAAAMMMMMMMMPPPPPPPSSSSSSDDDDDDDDKKKKKKKKKTTTTTTTIIIIIIIIGGGGVVVVVVVEEEEEEEEEDDDDDDDDDDDDDDDDAAAAAFFFFFFFFFFFNNNNNNNNTTTTTTTFFFFFFFFFFFFFFFFFFFFFFSSSSSSEEEEEEEEETTTTTTTGGGGAAAAAGGGGKKKKKKKKKHHHHHHHHHHVVVVVVVPPPPPPPRRRRRRRRRRRAAAAAVVVVVVVFFFFFFFFFFFLLLLLLLLDDDDDDDDLLLLLLLLEEEEEEEEEPPPPPPPTTTTTTTVVVVVVVVVVVVVVDDDDDDDDEEEEEEEEEIIIIIIIIRRRRRRRRRRRTTTTTTTGGGGTTTTTTTYYYYYYYYYYYYRRRRRRRRRRRQQQQQQQQQLLLLLLLLFFFFFFFFFFFHHHHHHHHHHPPPPPPPEEEEEEEEEQQQQQQQQQLLLLLLLLIIIIIIIISSSSSSGGGGKKKKKKKKKEEEEEEEEEDDDDDDDDAAAAAAAAAANNNNNNNNNNNNNNNNYYYYYYYYYYYYAAAAARRRRRRRRRRRGGGGHHHHHHHHHHYYYYYYYYYYYYTTTTTTTIIIIIIIIGGGGKKKKKKKKKEEEEEEEEEIIIIIIIIVVVVVVVDDDDDDDDLLLLLLLLCCCCCCLLLLLLLLDDDDDDDDRRRRRRRRRRRIIIIIIIIRRRRRRRRRRRKKKKKKKKKLLLLLLLLAAAAADDDDDDDDNNNNNNNNCCCCCCTTTTTTTGGGGLLLLLLLLQQQQQQQQQGGGGFFFFFFFFFFFLLLLLLLLVVVVVVVYYYYYYYYYYYYHHHHHHHHHHAAAAAVVVVVVVGGGGGGGGGGGGTTTTTTTGGGGSSSSSSGGGGLLLLLLLLGGGGAAAAALLLLLLLLLLLLLLLLLLLLLLLLEEEEEEEEERRRRRRRRRRRLLLLLLLLSSSSSSVVVVVVVDDDDDDDDYYYYYYYYYYYYGGGGKKKKKKKKKKKKKKKKKKSSSSSSKKKKKKKKKLLLLLLLLGGGGYYYYYYYYYYYYTTTTTTTVVVVVVVYYYYYYYYYYYYPPPPPPPSSSSSSPPPPPPPQQQQQQQQQVVVVVVVSSSSSSTTTTTTTAAAAAVVVVVVVVVVVVVVEEEEEEEEEPPPPPPPYYYYYYYYYYYYNNNNNNNNSSSSSSVVVVVVVLLLLLLLLSSSSSSTTTTTTTHHHHHHHHHHSSSSSSLLLLLLLLLLLLLLLLEEEEEEEEEHHHHHHHHHHTTTTTTTDDDDDDDDVVVVVVVAAAAAAAAAAMMMMMMMMLLLLLLLLDDDDDDDDNNNNNNNNEEEEEEEEEAAAAAIIIIIIIIYYYYYYYYYYYYDDDDDDDDLLLLLLLLTTTTTTTRRRRRRRRRRRAAAAANNNNNNNNLLLLLLLLDDDDDDDDIIIIIIIIEEEEEEEEERRRRRRRRRRRPPPPPPPTTTTTTTYYYYYYYYYYYYTTTTTTTNNNNNNNNLLLLLLLLNNNNNNNNRRRRRRRRRRRLLLLLLLLIIIIIIIIGGGGQQQQQQQQQVVVVVVVVVVVVVVSSSSSSAAAAALLLLLLLLTTTTTTTAAAAASSSSSSLLLLLLLLRRRRRRRRRRRFFFFFFFFFFFDDDDDDDDGGGGAAAAALLLLLLLLNNNNNNNNVVVVVVVDDDDDDDDLLLLLLLLTTTTTTTEEEEEEEEEFFFFFFFFFFFQQQQQQQQQTTTTTTTNNNNNNNNLLLLLLLLVVVVVVVPPPPPPPYYYYYYYYYYYYPPPPPPPRRRRRRRRRRRIIIIIIIIHHHHHHHHHHFFFFFFFFFFFVVVVVVVLLLLLLLLTTTTTTTTTTTTTTYYYYYYYYYYYYAAAAAPPPPPPPVVVVVVVIIIIIIIISSSSSSAAAAAEEEEEEEEEKKKKKKKKKAAAAAYYYYYYYYYYYYHHHHHHHHHHEEEEEEEEEQQQQQQQQQLLLLLLLLSSSSSSVVVVVVVSSSSSSEEEEEEEEEIIIIIIIISSSSSSNNNNNNNNAAAAAVVVVVVVFFFFFFFFFFFEEEEEEEEEPPPPPPPAAAAASSSSSSMMMMMMMMMMMMMMMMTTTTTTTKKKKKKKKKCCCCCCDDDDDDDDPPPPPPPRRRRRRRRRRRHHHHHHHHHHGGGGKKKKKKKKKYYYYYYYYYYYYMMMMMMMMAAAAACCCCCCCCCCCCLLLLLLLLMMMMMMMMYYYYYYYYYYYYRRRRRRRRRRRGGGGDDDDDDDDVVVVVVVVVVVVVVPPPPPPPKKKKKKKKKDDDDDDDDVVVVVVVNNNNNNNNAAAAAAAAAAVVVVVVVAAAAATTTTTTTIIIIIIIIKKKKKKKKKTTTTTTTKKKKKKKKKRRRRRRRRRRRTTTTTTTIIIIIIIIQQQQQQQQQFFFFFFFFFFFVVVVVVVDDDDDDDDWWWWWWWWWWWWWWSSSSSSPPPPPPPTTTTTTTGGGGFFFFFFFFFFFKKKKKKKKKCCCCCCGGGGIIIIIIIINNNNNNNNYYYYYYYYYYYYQQQQQQQQQPPPPPPPPPPPPPPTTTTTTTVVVVVVVVVVVVVVPPPPPPPGGGGGGGGDDDDDDDDLLLLLLLLAAAAAKKKKKKKKKVVVVVVVQQQQQQQQQRRRRRRRRRRRAAAAAVVVVVVVCCCCCCMMMMMMMMIIIIIIIIAAAAANNNNNNNNSSSSSSTTTTTTTAAAAAIIIIIIIIAAAAAEEEEEEEEEVVVVVVVFFFFFFFFFFFAAAAARRRRRRRRRRRIIIIIIIIDDDDDDDDHHHHHHHHHHKKKKKKKKKFFFFFFFFFFFDDDDDDDDLLLLLLLLMMMMMMMMYYYYYYYYYYYYSSSSSSKKKKKKKKKRRRRRRRRRRRAAAAAFFFFFFFFFFFVVVVVVVHHHHHHHHHHWWWWWWWWWWWWWWYYYYYYYYYYYYVVVVVVVGGGGEEEEEEEEEGGGGMMMMMMMMEEEEEEEEEEEEEEEEEEGGGGEEEEEEEEEFFFFFFFFFFFSSSSSSEEEEEEEEEAAAAARRRRRRRRRRREEEEEEEEEDDDDDDDDLLLLLLLLAAAAAAAAAALLLLLLLLEEEEEEEEEKKKKKKKKKDDDDDDDDYYYYYYYYYYYYEEEEEEEEEEEEEEEEEEVVVVVVVGGGGAAAAAEEEEEEEEESSSSSSAAAAADDDDDDDDMMMMMMMMEEEEEEEEEGGGGEEEEEEEEEEEEEEEEEEDDDDDDDDVVVVVVVEEEEEEEEEEEEEEEEEEYYYYYYYYYYYYY

SEQ ID NO: 104 - protein, 3494 aa, Triticum aestivum
MMMMMMMMRRRRRRRRRRREEEEEEEEECCCCCCIIIIIIIISSSSSSIIIIIIIIHHHHHHHHHHIIIIIIIIGGGGQQQQQQQQQAAAAAGGGGIIIIIIIIQQQQQQQQQVVVVVVVGGGGNNNNNNNNAAAAACCCCCCWWWWWWWWWWWWWWEEEEEEEEELLLLLLLLYYYYYYYYYYYYCCCCCCLLLLLLLLEEEEEEEEEHHHHHHHHHHGGGGIIIIIIIIQQQQQQQQQPPPPPPPDDDDDDDDGGGGQQQQQQQQQMMMMMMMMPPPPPPPGGGGDDDDDDDDKKKKKKKKKTTTTTTTVVVVVVVGGGGGGGGGGGGDDDDDDDDDDDDDDDDAAAAAFFFFFFFFFFFNNNNNNNNTTTTTTTFFFFFFFFFFFFFFFFFFFFFFSSSSSSEEEEEEEEETTTTTTTGGGGAAAAAGGGGKKKKKKKKKHHHHHHHHHHVVVVVVVPPPPPPPRRRRRRRRRRRAAAAAVVVVVVVFFFFFFFFFFFVVVVVVVDDDDDDDDLLLLLLLLEEEEEEEEEPPPPPPPTTTTTTTVVVVVVVIIIIIIIIDDDDDDDDEEEEEEEEEVVVVVVVRRRRRRRRRRRTTTTTTTGGGGAAAAAYYYYYYYYYYYYRRRRRRRRRRRQQQQQQQQQLLLLLLLLFFFFFFFFFFFHHHHHHHHHHPPPPPPPEEEEEEEEEQQQQQQQQQLLLLLLLLIIIIIIIISSSSSSGGGGKKKKKKKKKEEEEEEEEEDDDDDDDDAAAAAAAAAANNNNNNNNNNNNNNNNFFFFFFFFFFFAAAAARRRRRRRRRRRGGGGHHHHHHHHHHYYYYYYYYYYYYTTTTTTTIIIIIIIIGGGGKKKKKKKKKEEEEEEEEEIIIIIIIIVVVVVVVDDDDDDDDLLLLLLLLCCCCCCLLLLLLLLDDDDDDDDRRRRRRRRRRRIIIIIIIIRRRRRRRRRRRKKKKKKKKKLLLLLLLLSSSSSSDDDDDDDDNNNNNNNNCCCCCCTTTTTTTGGGGLLLLLLLLQQQQQQQQQGGGGFFFFFFFFFFFLLLLLLLLVVVVVVVFFFFFFFFFFFNNNNNNNNAAAAAVVVVVVVGGGGGGGGGGGGTTTTTTTGGGGSSSSSSGGGGLLLLLLLLGGGGSSSSSSLLLLLLLLLLLLLLLLLLLLLLLLEEEEEEEEERRRRRRRRRRRLLLLLLLLSSSSSSVVVVVVVDDDDDDDDYYYYYYYYYYYYGGGGRRRRRRRRRRRKKKKKKKKKSSSSSSKKKKKKKKKLLLLLLLLGGGGFFFFFFFFFFFTTTTTTTVVVVVVVYYYYYYYYYYYYPPPPPPPSSSSSSPPPPPPPQQQQQQQQQVVVVVVVSSSSSSTTTTTTTSSSSSSVVVVVVVVVVVVVVEEEEEEEEEPPPPPPPYYYYYYYYYYYYNNNNNNNNSSSSSSVVVVVVVLLLLLLLLSSSSSSTTTTTTTHHHHHHHHHHSSSSSSLLLLLLLLLLLLLLLLEEEEEEEEEHHHHHHHHHHTTTTTTTDDDDDDDDVVVVVVVSSSSSSIIIIIIIILLLLLLLLLLLLLLLLDDDDDDDDNNNNNNNNEEEEEEEEEAAAAAIIIIIIIIYYYYYYYYYYYYDDDDDDDDIIIIIIIICCCCCCRRRRRRRRRRRRRRRRRRRRRRSSSSSSLLLLLLLLDDDDDDDDIIIIIIIIEEEEEEEEERRRRRRRRRRRPPPPPPPTTTTTTTYYYYYYYYYYYYTTTTTTTNNNNNNNNLLLLLLLLNNNNNNNNRRRRRRRRRRRLLLLLLLLVVVVVVVSSSSSSQQQQQQQQQVVVVVVVIIIIIIIISSSSSSSSSSSSLLLLLLLLTTTTTTTAAAAASSSSSSLLLLLLLLRRRRRRRRRRRFFFFFFFFFFFDDDDDDDDGGGGAAAAALLLLLLLLNNNNNNNNVVVVVVVDDDDDDDDVVVVVVVNNNNNNNNEEEEEEEEEFFFFFFFFFFFQQQQQQQQQTTTTTTTNNNNNNNNLLLLLLLLVVVVVVVPPPPPPPYYYYYYYYYYYYPPPPPPPRRRRRRRRRRRIIIIIIIIHHHHHHHHHHFFFFFFFFFFFMMMMMMMMLLLLLLLLSSSSSSSSSSSSYYYYYYYYYYYYAAAAAPPPPPPPVVVVVVVIIIIIIIISSSSSSAAAAAEEEEEEEEEKKKKKKKKKAAAAAYYYYYYYYYYYYHHHHHHHHHHEEEEEEEEEQQQQQQQQQLLLLLLLLSSSSSSVVVVVVVAAAAAEEEEEEEEEIIIIIIIITTTTTTTNNNNNNNNSSSSSSAAAAAFFFFFFFFFFFEEEEEEEEEPPPPPPPSSSSSSSSSSSSMMMMMMMMMMMMMMMMAAAAAKKKKKKKKKCCCCCCDDDDDDDDPPPPPPPRRRRRRRRRRRHHHHHHHHHHGGGGKKKKKKKKKYYYYYYYYYYYYMMMMMMMMAAAAACCCCCCCCCCCCLLLLLLLLMMMMMMMMYYYYYYYYYYYYRRRRRRRRRRRGGGGDDDDDDDDVVVVVVVVVVVVVVPPPPPPPKKKKKKKKKDDDDDDDDVVVVVVVNNNNNNNNAAAAAAAAAAVVVVVVVAAAAATTTTTTTIIIIIIIIKKKKKKKKKTTTTTTTKKKKKKKKKRRRRRRRRRRRTTTTTTTIIIIIIIIQQQQQQQQQFFFFFFFFFFFVVVVVVVDDDDDDDDWWWWWWWWWWWWWWCCCCCCPPPPPPPTTTTTTTGGGGFFFFFFFFFFFKKKKKKKKKCCCCCCGGGGIIIIIIIINNNNNNNNYYYYYYYYYYYYQQQQQQQQQPPPPPPPPPPPPPPGGGGVVVVVVVVVVVVVVPPPPPPPGGGGGGGGDDDDDDDDLLLLLLLLAAAAAKKKKKKKKKVVVVVVVQQQQQQQQQRRRRRRRRRRRAAAAAVVVVVVVCCCCCCMMMMMMMMIIIIIIIISSSSSSNNNNNNNNSSSSSSTTTTTTTSSSSSSVVVVVVVVVVVVVVEEEEEEEEEVVVVVVVFFFFFFFFFFFSSSSSSRRRRRRRRRRRIIIIIIIIDDDDDDDDHHHHHHHHHHKKKKKKKKKFFFFFFFFFFFDDDDDDDDLLLLLLLLMMMMMMMMYYYYYYYYYYYYAAAAAKKKKKKKKKRRRRRRRRRRRAAAAAFFFFFFFFFFFVVVVVVVHHHHHHHHHHWWWWWWWWWWWWWWYYYYYYYYYYYYVVVVVVVGGGGEEEEEEEEEGGGGMMMMMMMMEEEEEEEEEEEEEEEEEEGGGGEEEEEEEEEFFFFFFFFFFFSSSSSSEEEEEEEEEAAAAARRRRRRRRRRREEEEEEEEEDDDDDDDDLLLLLLLLAAAAAAAAAALLLLLLLLEEEEEEEEEKKKKKKKKKDDDDDDDDYYYYYYYYYYYYEEEEEEEEEEEEEEEEEEVVVVVVVGGGGAAAAAEEEEEEEEEFFFFFFFFFFFDDDDDDDDEEEEEEEEEGGGGEEEEEEEEEDDDDDDDDGGGGDDDDDDDDEEEEEEEEEGGGGDDDDDDDDEEEEEEEEEYYYYYYYYYYYYY

SEQ ID NO: 105 - protein, 3506 aa, Xenopus laevis
MMMMMMMMRRRRRRRRRRREEEEEEEEECCCCCCIIIIIIIISSSSSSIIIIIIIIHHHHHHHHHHVVVVVVVGGGGQQQQQQQQQAAAAAGGGGVVVVVVVQQQQQQQQQIIIIIIIIGGGGNNNNNNNNAAAAACCCCCCWWWWWWWWWWWWWWEEEEEEEEELLLLLLLLYYYYYYYYYYYYCCCCCCLLLLLLLLEEEEEEEEEHHHHHHHHHHGGGGIIIIIIIIQQQQQQQQQPPPPPPPDDDDDDDDGGGGQQQQQQQQQMMMMMMMMPPPPPPPSSSSSSDDDDDDDDKKKKKKKKKTTTTTTTIIIIIIIIGGGGGGGGGGGGDDDDDDDDDDDDDDDDSSSSSSFFFFFFFFFFFNNNNNNNNTTTTTTTFFFFFFFFFFFFFFFFFFFFFFSSSSSSEEEEEEEEETTTTTTTGGGGAAAAAGGGGKKKKKKKKKHHHHHHHHHHVVVVVVVPPPPPPPRRRRRRRRRRRAAAAAVVVVVVVFFFFFFFFFFFVVVVVVVDDDDDDDDLLLLLLLLEEEEEEEEEPPPPPPPTTTTTTTVVVVVVVIIIIIIIIDDDDDDDDEEEEEEEEEVVVVVVVRRRRRRRRRRRTTTTTTTGGGGTTTTTTTYYYYYYYYYYYYRRRRRRRRRRRQQQQQQQQQLLLLLLLLFFFFFFFFFFFHHHHHHHHHHPPPPPPPEEEEEEEEEQQQQQQQQQLLLLLLLLIIIIIIIITTTTTTTGGGGKKKKKKKKKEEEEEEEEEDDDDDDDDAAAAAAAAAANNNNNNNNNNNNNNNNYYYYYYYYYYYYAAAAARRRRRRRRRRRGGGGHHHHHHHHHHYYYYYYYYYYYYTTTTTTTIIIIIIIIGGGGKKKKKKKKKEEEEEEEEEIIIIIIIIIIIIIIIIDDDDDDDDLLLLLLLLVVVVVVVLLLLLLLLDDDDDDDDRRRRRRRRRRRIIIIIIIIRRRRRRRRRRRKKKKKKKKKLLLLLLLLAAAAADDDDDDDDQQQQQQQQQCCCCCCTTTTTTTGGGGLLLLLLLLQQQQQQQQQGGGGFFFFFFFFFFFLLLLLLLLVVVVVVVFFFFFFFFFFFHHHHHHHHHHSSSSSSFFFFFFFFFFFGGGGGGGGGGGGTTTTTTTGGGGSSSSSSGGGGFFFFFFFFFFFTTTTTTTSSSSSSLLLLLLLLLLLLLLLLLLLLLLLLEEEEEEEEERRRRRRRRRRRLLLLLLLLSSSSSSVVVVVVVDDDDDDDDYYYYYYYYYYYYGGGGKKKKKKKKKKKKKKKKKKSSSSSSKKKKKKKKKLLLLLLLLEEEEEEEEEFFFFFFFFFFFAAAAAIIIIIIIIYYYYYYYYYYYYPPPPPPPAAAAAPPPPPPPQQQQQQQQQVVVVVVVSSSSSSTTTTTTTAAAAAVVVVVVVVVVVVVVEEEEEEEEEPPPPPPPYYYYYYYYYYYYNNNNNNNNSSSSSSIIIIIIIILLLLLLLLTTTTTTTTTTTTTTHHHHHHHHHHTTTTTTTTTTTTTTLLLLLLLLEEEEEEEEEHHHHHHHHHHSSSSSSDDDDDDDDCCCCCCAAAAAFFFFFFFFFFFMMMMMMMMVVVVVVVDDDDDDDDNNNNNNNNEEEEEEEEEAAAAAIIIIIIIIYYYYYYYYYYYYDDDDDDDDIIIIIIIICCCCCCRRRRRRRRRRRRRRRRRRRRRRNNNNNNNNLLLLLLLLDDDDDDDDIIIIIIIIEEEEEEEEERRRRRRRRRRRPPPPPPPTTTTTTTYYYYYYYYYYYYTTTTTTTNNNNNNNNLLLLLLLLNNNNNNNNRRRRRRRRRRRLLLLLLLLIIIIIIIISSSSSSQQQQQQQQQIIIIIIIIVVVVVVVSSSSSSSSSSSSIIIIIIIITTTTTTTAAAAASSSSSSLLLLLLLLRRRRRRRRRRRFFFFFFFFFFFDDDDDDDDGGGGAAAAALLLLLLLLNNNNNNNNVVVVVVVDDDDDDDDLLLLLLLLTTTTTTTEEEEEEEEEFFFFFFFFFFFQQQQQQQQQTTTTTTTNNNNNNNNLLLLLLLLVVVVVVVPPPPPPPYYYYYYYYYYYYPPPPPPPRRRRRRRRRRRIIIIIIIIHHHHHHHHHHFFFFFFFFFFFPPPPPPPLLLLLLLLAAAAATTTTTTTYYYYYYYYYYYYAAAAAPPPPPPPVVVVVVVIIIIIIIISSSSSSAAAAAEEEEEEEEEKKKKKKKKKAAAAAYYYYYYYYYYYYHHHHHHHHHHEEEEEEEEEQQQQQQQQQLLLLLLLLTTTTTTTVVVVVVVAAAAADDDDDDDDIIIIIIIITTTTTTTNNNNNNNNAAAAACCCCCCFFFFFFFFFFFEEEEEEEEEPPPPPPPAAAAANNNNNNNNQQQQQQQQQMMMMMMMMVVVVVVVKKKKKKKKKCCCCCCDDDDDDDDPPPPPPPRRRRRRRRRRRHHHHHHHHHHGGGGKKKKKKKKKYYYYYYYYYYYYMMMMMMMMAAAAACCCCCCCCCCCCLLLLLLLLLLLLLLLLYYYYYYYYYYYYRRRRRRRRRRRGGGGDDDDDDDDVVVVVVVVVVVVVVPPPPPPPKKKKKKKKKDDDDDDDDVVVVVVVNNNNNNNNAAAAAAAAAAIIIIIIIIAAAAATTTTTTTIIIIIIIIKKKKKKKKKTTTTTTTKKKKKKKKKRRRRRRRRRRRSSSSSSIIIIIIIIQQQQQQQQQFFFFFFFFFFFVVVVVVVDDDDDDDDWWWWWWWWWWWWWWCCCCCCPPPPPPPTTTTTTTGGGGFFFFFFFFFFFKKKKKKKKKVVVVVVVGGGGIIIIIIIINNNNNNNNYYYYYYYYYYYYQQQQQQQQQPPPPPPPPPPPPPPTTTTTTTVVVVVVVVVVVVVVPPPPPPPGGGGGGGGDDDDDDDDLLLLLLLLAAAAAKKKKKKKKKVVVVVVVQQQQQQQQQRRRRRRRRRRRAAAAAVVVVVVVCCCCCCMMMMMMMMLLLLLLLLSSSSSSNNNNNNNNTTTTTTTTTTTTTTAAAAAIIIIIIIIAAAAAEEEEEEEEEAAAAAWWWWWWWWWWWWWWAAAAARRRRRRRRRRRLLLLLLLLDDDDDDDDHHHHHHHHHHKKKKKKKKKFFFFFFFFFFFDDDDDDDDLLLLLLLLMMMMMMMMYYYYYYYYYYYYAAAAAKKKKKKKKKRRRRRRRRRRRAAAAAFFFFFFFFFFFVVVVVVVHHHHHHHHHHWWWWWWWWWWWWWWYYYYYYYYYYYYVVVVVVVGGGGEEEEEEEEEGGGGMMMMMMMMEEEEEEEEEEEEEEEEEEGGGGEEEEEEEEEFFFFFFFFFFFSSSSSSEEEEEEEEEAAAAARRRRRRRRRRREEEEEEEEEDDDDDDDDMMMMMMMMAAAAAAAAAALLLLLLLLEEEEEEEEEKKKKKKKKKDDDDDDDDYYYYYYYYYYYYEEEEEEEEEEEEEEEEEEVVVVVVVGGGGAAAAADDDDDDDDSSSSSSAAAAADDDDDDDDAAAAAEEEEEEEEEDDDDDDDDEEEEEEEEEGGGGEEEEEEEEEEEEEEEEEEYYYYYYYYYYYYY

SEQ ID NO: 106 - protein, 3469 aa, Anemia phyllitidis
MMMMMMMMRRRRRRRRRRREEEEEEEEEIIIIIIIILLLLLLLLHHHHHHHHHHVVVVVVVQQQQQQQQQGGGGGGGGQQQQQQQQQCCCCCCGGGGNNNNNNNNQQQQQQQQQIIIIIIIIGGGGAAAAAKKKKKKKKKFFFFFFFFFFFWWWWWWWWWWWWWWEEEEEEEEEVVVVVVVVVVVVVVCCCCCCTTTTTTTEEEEEEEEEHHHHHHHHHHGGGGIIIIIIIIDDDDDDDDPPPPPPPTTTTTTTGGGGTTTTTTTYYYYYYYYYYYYRRRRRRRRRRRGGGGDDDDDDDDSSSSSSEEEEEEEEETTTTTTTQQQQQQQQQLLLLLLLLEEEEEEEEERRRRRRRRRRRVVVVVVVNNNNNNNNVVVVVVVYYYYYYYYYYYYYYYYYYYYYYYYNNNNNNNNEEEEEEEEEAAAAASSSSSSCCCCCCGGGGRRRRRRRRRRRYYYYYYYYYYYYVVVVVVVPPPPPPPRRRRRRRRRRRAAAAAVVVVVVVLLLLLLLLMMMMMMMMDDDDDDDDLLLLLLLLEEEEEEEEEPPPPPPPGGGGTTTTTTTMMMMMMMMDDDDDDDDSSSSSSVVVVVVVRRRRRRRRRRRSSSSSSGGGGHHHHHHHHHHYYYYYYYYYYYYGGGGQQQQQQQQQIIIIIIIIFFFFFFFFFFFRRRRRRRRRRRPPPPPPPDDDDDDDDNNNNNNNNFFFFFFFFFFFVVVVVVVFFFFFFFFFFFGGGGQQQQQQQQQSSSSSSGGGGAAAAAGGGGNNNNNNNNNNNNNNNNWWWWWWWWWWWWWWAAAAAKKKKKKKKKGGGGGGGGYYYYYYYYYYYYTTTTTTTEEEEEEEEEGGGGAAAAAEEEEEEEEELLLLLLLLIIIIIIIIDDDDDDDDSSSSSSVVVVVVVLLLLLLLLAAAAAVVVVVVVVVVVVVVRRRRRRRRRRRKKKKKKKKKEEEEEEEEEAAAAAEEEEEEEEENNNNNNNNCCCCCCDDDDDDDDCCCCCCLLLLLLLLQQQQQQQQQGGGGFFFFFFFFFFFQQQQQQQQQVVVVVVVCCCCCCHHHHHHHHHHSSSSSSLLLLLLLLGGGGGGGGGGGGTTTTTTTGGGGSSSSSSGGGGMMMMMMMMGGGGTTTTTTTLLLLLLLLLLLLLLLLIIIIIIIISSSSSSKKKKKKKKKIIIIIIIIRRRRRRRRRRREEEEEEEEEEEEEEEEEEYYYYYYYYYYYYPPPPPPPDDDDDDDDRRRRRRRRRRRMMMMMMMMMMMMMMMMMMMMMMMMTTTTTTTFFFFFFFFFFFSSSSSSVVVVVVVFFFFFFFFFFFAAAAASSSSSSPPPPPPPKKKKKKKKKVVVVVVVSSSSSSDDDDDDDDTTTTTTTVVVVVVVVVVVVVVEEEEEEEEEPPPPPPPYYYYYYYYYYYYNNNNNNNNAAAAATTTTTTTLLLLLLLLSSSSSSVVVVVVVHHHHHHHHHHQQQQQQQQQLLLLLLLLVVVVVVVEEEEEEEEENNNNNNNNAAAAADDDDDDDDEEEEEEEEECCCCCCMMMMMMMMVVVVVVVLLLLLLLLDDDDDDDDNNNNNNNNEEEEEEEEEAAAAALLLLLLLLYYYYYYYYYYYYDDDDDDDDIIIIIIIIGGGGLLLLLLLLRRRRRRRRRRRTTTTTTTLLLLLLLLKKKKKKKKKLLLLLLLLVVVVVVVTTTTTTTPPPPPPPTTTTTTTFFFFFFFFFFFGGGGDDDDDDDDLLLLLLLLNNNNNNNNHHHHHHHHHHLLLLLLLLIIIIIIIISSSSSSAAAAATTTTTTTMMMMMMMMSSSSSSGGGGVVVVVVVTTTTTTTCCCCCCCCCCCCLLLLLLLLRRRRRRRRRRRFFFFFFFFFFFPPPPPPPGGGGQQQQQQQQQLLLLLLLLNNNNNNNNSSSSSSDDDDDDDDLLLLLLLLRRRRRRRRRRRKKKKKKKKKLLLLLLLLAAAAAVVVVVVVNNNNNNNNLLLLLLLLIIIIIIIIPPPPPPPFFFFFFFFFFFPPPPPPPRRRRRRRRRRRLLLLLLLLHHHHHHHHHHFFFFFFFFFFFFFFFFFFFFFFMMMMMMMMVVVVVVVGGGGFFFFFFFFFFFAAAAAPPPPPPPLLLLLLLLTTTTTTTSSSSSSRRRRRRRRRRRGGGGSSSSSSQQQQQQQQQQQQQQQQQQYYYYYYYYYYYYGGGGSSSSSSLLLLLLLLTTTTTTTVVVVVVVPPPPPPPEEEEEEEEELLLLLLLLTTTTTTTQQQQQQQQQQQQQQQQQQMMMMMMMMWWWWWWWWWWWWWWDDDDDDDDAAAAAKKKKKKKKKNNNNNNNNMMMMMMMMMMMMMMMMCCCCCCAAAAAAAAAADDDDDDDDPPPPPPPRRRRRRRRRRRHHHHHHHHHHGGGGRRRRRRRRRRRYYYYYYYYYYYYLLLLLLLLTTTTTTTAAAAASSSSSSAAAAAMMMMMMMMFFFFFFFFFFFRRRRRRRRRRRGGGGKKKKKKKKKMMMMMMMMSSSSSSTTTTTTTKKKKKKKKKEEEEEEEEEVVVVVVVDDDDDDDDEEEEEEEEEQQQQQQQQQMMMMMMMMIIIIIIIINNNNNNNNVVVVVVVQQQQQQQQQNNNNNNNNKKKKKKKKKNNNNNNNNSSSSSSSSSSSSYYYYYYYYYYYYFFFFFFFFFFFVVVVVVVEEEEEEEEEWWWWWWWWWWWWWWIIIIIIIIPPPPPPPNNNNNNNNNNNNNNNNVVVVVVVKKKKKKKKKSSSSSSSSSSSSVVVVVVVCCCCCCDDDDDDDDIIIIIIIIPPPPPPPPPPPPPPVVVVVVVGGGGLLLLLLLLKKKKKKKKKMMMMMMMMAAAAAVVVVVVVTTTTTTTFFFFFFFFFFFIIIIIIIIGGGGNNNNNNNNSSSSSSTTTTTTTSSSSSSIIIIIIIIQQQQQQQQQEEEEEEEEEMMMMMMMMFFFFFFFFFFFRRRRRRRRRRRRRRRRRRRRRRVVVVVVVSSSSSSDDDDDDDDQQQQQQQQQFFFFFFFFFFFTTTTTTTAAAAAMMMMMMMMFFFFFFFFFFFRRRRRRRRRRRRRRRRRRRRRRKKKKKKKKKAAAAAFFFFFFFFFFFLLLLLLLLHHHHHHHHHHWWWWWWWWWWWWWWYYYYYYYYYYYYTTTTTTTGGGGEEEEEEEEEGGGGMMMMMMMMDDDDDDDDEEEEEEEEEMMMMMMMMEEEEEEEEEFFFFFFFFFFFTTTTTTTEEEEEEEEEAAAAAEEEEEEEEESSSSSSNNNNNNNNMMMMMMMMNNNNNNNNDDDDDDDDLLLLLLLLVVVVVVVSSSSSSEEEEEEEEEYYYYYYYYYYYYQQQQQQQQQQQQQQQQQQYYYYYYYYYYYYQQQQQQQQQDDDDDDDDAAAAATTTTTTTAAAAAEEEEEEEEERRRRRRRRRRREEEEEEEEEGGGGEEEEEEEEEYYYYYYYYYYYYEEEEEEEEEEEEEEEEEEDDDDDDDDYYYYYYYYYYYYDDDDDDDDEEEEEEEEEAAAAAA

SEQ ID NO: 107 - protein, 3518 aa, Arabidopsis thaliana
MMMMMMMMRRRRRRRRRRREEEEEEEEEIIIIIIIILLLLLLLLHHHHHHHHHHVVVVVVVQQQQQQQQQGGGGGGGGQQQQQQQQQCCCCCCGGGGNNNNNNNNQQQQQQQQQIIIIIIIIGGGGSSSSSSKKKKKKKKKFFFFFFFFFFFWWWWWWWWWWWWWWEEEEEEEEEVVVVVVVIIIIIIIICCCCCCDDDDDDDDEEEEEEEEEHHHHHHHHHHGGGGVVVVVVVDDDDDDDDPPPPPPPTTTTTTTGGGGRRRRRRRRRRRYYYYYYYYYYYYNNNNNNNNGGGGDDDDDDDDSSSSSSAAAAADDDDDDDDLLLLLLLLQQQQQQQQQLLLLLLLLEEEEEEEEERRRRRRRRRRRIIIIIIIINNNNNNNNVVVVVVVYYYYYYYYYYYYYYYYYYYYYYYYNNNNNNNNEEEEEEEEEAAAAASSSSSSGGGGGGGGRRRRRRRRRRRYYYYYYYYYYYYVVVVVVVPPPPPPPRRRRRRRRRRRAAAAAVVVVVVVLLLLLLLLMMMMMMMMDDDDDDDDLLLLLLLLEEEEEEEEEPPPPPPPGGGGTTTTTTTMMMMMMMMDDDDDDDDSSSSSSIIIIIIIIRRRRRRRRRRRSSSSSSGGGGPPPPPPPYYYYYYYYYYYYGGGGQQQQQQQQQIIIIIIIIFFFFFFFFFFFRRRRRRRRRRRPPPPPPPDDDDDDDDNNNNNNNNFFFFFFFFFFFVVVVVVVFFFFFFFFFFFGGGGQQQQQQQQQSSSSSSGGGGAAAAAGGGGNNNNNNNNNNNNNNNNWWWWWWWWWWWWWWAAAAAKKKKKKKKKGGGGHHHHHHHHHHYYYYYYYYYYYYTTTTTTTEEEEEEEEEGGGGAAAAAEEEEEEEEELLLLLLLLIIIIIIIIDDDDDDDDAAAAAVVVVVVVLLLLLLLLDDDDDDDDVVVVVVVVVVVVVVRRRRRRRRRRRKKKKKKKKKEEEEEEEEEAAAAAEEEEEEEEENNNNNNNNCCCCCCDDDDDDDDCCCCCCLLLLLLLLQQQQQQQQQGGGGFFFFFFFFFFFQQQQQQQQQVVVVVVVCCCCCCHHHHHHHHHHSSSSSSLLLLLLLLGGGGGGGGGGGGTTTTTTTGGGGSSSSSSGGGGMMMMMMMMGGGGTTTTTTTLLLLLLLLLLLLLLLLIIIIIIIISSSSSSKKKKKKKKKIIIIIIIIRRRRRRRRRRREEEEEEEEEEEEEEEEEEYYYYYYYYYYYYPPPPPPPDDDDDDDDRRRRRRRRRRRMMMMMMMMMMMMMMMMLLLLLLLLTTTTTTTFFFFFFFFFFFSSSSSSVVVVVVVFFFFFFFFFFFPPPPPPPSSSSSSPPPPPPPKKKKKKKKKVVVVVVVSSSSSSDDDDDDDDTTTTTTTVVVVVVVVVVVVVVEEEEEEEEEPPPPPPPYYYYYYYYYYYYNNNNNNNNAAAAATTTTTTTLLLLLLLLSSSSSSVVVVVVVHHHHHHHHHHQQQQQQQQQLLLLLLLLVVVVVVVEEEEEEEEENNNNNNNNAAAAADDDDDDDDEEEEEEEEECCCCCCMMMMMMMMVVVVVVVLLLLLLLLDDDDDDDDNNNNNNNNEEEEEEEEEAAAAALLLLLLLLYYYYYYYYYYYYDDDDDDDDIIIIIIIICCCCCCFFFFFFFFFFFRRRRRRRRRRRTTTTTTTLLLLLLLLKKKKKKKKKLLLLLLLLSSSSSSTTTTTTTPPPPPPPSSSSSSFFFFFFFFFFFGGGGDDDDDDDDLLLLLLLLNNNNNNNNHHHHHHHHHHLLLLLLLLIIIIIIIISSSSSSAAAAATTTTTTTMMMMMMMMSSSSSSGGGGVVVVVVVTTTTTTTCCCCCCSSSSSSLLLLLLLLRRRRRRRRRRRFFFFFFFFFFFPPPPPPPGGGGQQQQQQQQQLLLLLLLLNNNNNNNNSSSSSSDDDDDDDDLLLLLLLLRRRRRRRRRRRKKKKKKKKKLLLLLLLLAAAAAVVVVVVVNNNNNNNNLLLLLLLLIIIIIIIIPPPPPPPFFFFFFFFFFFPPPPPPPRRRRRRRRRRRLLLLLLLLHHHHHHHHHHFFFFFFFFFFFFFFFFFFFFFFMMMMMMMMVVVVVVVGGGGFFFFFFFFFFFAAAAAPPPPPPPLLLLLLLLTTTTTTTSSSSSSRRRRRRRRRRRGGGGSSSSSSQQQQQQQQQQQQQQQQQQYYYYYYYYYYYYIIIIIIIISSSSSSLLLLLLLLTTTTTTTVVVVVVVPPPPPPPEEEEEEEEELLLLLLLLTTTTTTTQQQQQQQQQQQQQQQQQQMMMMMMMMWWWWWWWWWWWWWWDDDDDDDDAAAAAKKKKKKKKKNNNNNNNNMMMMMMMMMMMMMMMMCCCCCCAAAAAAAAAADDDDDDDDPPPPPPPRRRRRRRRRRRHHHHHHHHHHGGGGRRRRRRRRRRRYYYYYYYYYYYYLLLLLLLLTTTTTTTAAAAASSSSSSAAAAAMMMMMMMMFFFFFFFFFFFRRRRRRRRRRRGGGGKKKKKKKKKMMMMMMMMSSSSSSTTTTTTTKKKKKKKKKEEEEEEEEEVVVVVVVDDDDDDDDEEEEEEEEEQQQQQQQQQIIIIIIIILLLLLLLLNNNNNNNNVVVVVVVQQQQQQQQQNNNNNNNNKKKKKKKKKNNNNNNNNSSSSSSSSSSSSYYYYYYYYYYYYFFFFFFFFFFFVVVVVVVEEEEEEEEEWWWWWWWWWWWWWWIIIIIIIIPPPPPPPNNNNNNNNNNNNNNNNVVVVVVVKKKKKKKKKSSSSSSSSSSSSVVVVVVVCCCCCCDDDDDDDDIIIIIIIIPPPPPPPPPPPPPPTTTTTTTGGGGIIIIIIIIKKKKKKKKKMMMMMMMMAAAAASSSSSSTTTTTTTFFFFFFFFFFFVVVVVVVGGGGNNNNNNNNSSSSSSTTTTTTTSSSSSSIIIIIIIIQQQQQQQQQEEEEEEEEEMMMMMMMMFFFFFFFFFFFRRRRRRRRRRRRRRRRRRRRRRVVVVVVVSSSSSSEEEEEEEEEQQQQQQQQQFFFFFFFFFFFTTTTTTTAAAAAMMMMMMMMFFFFFFFFFFFRRRRRRRRRRRRRRRRRRRRRRKKKKKKKKKAAAAAFFFFFFFFFFFLLLLLLLLHHHHHHHHHHWWWWWWWWWWWWWWYYYYYYYYYYYYTTTTTTTGGGGEEEEEEEEEGGGGMMMMMMMMDDDDDDDDEEEEEEEEEMMMMMMMMEEEEEEEEEFFFFFFFFFFFTTTTTTTEEEEEEEEEAAAAAEEEEEEEEESSSSSSNNNNNNNNMMMMMMMMNNNNNNNNDDDDDDDDLLLLLLLLVVVVVVVSSSSSSEEEEEEEEEYYYYYYYYYYYYQQQQQQQQQQQQQQQQQQYYYYYYYYYYYYQQQQQQQQQDDDDDDDDAAAAATTTTTTTAAAAADDDDDDDDEEEEEEEEEEEEEEEEEEDDDDDDDDEEEEEEEEEYYYYYYYYYYYYDDDDDDDDEEEEEEEEEEEEEEEEEEEEEEEEEEEEEEEEEEEEQQQQQQQQQVVVVVVVYYYYYYYYYYYYEEEEEEEEESSSSSSS

SEQ ID NO: 108 - protein, 3031 aa, Avena sativa
AAAAAVVVVVVVLLLLLLLLMMMMMMMMDDDDDDDDLLLLLLLLEEEEEEEEEPPPPPPPGGGGTTTTTTTMMMMMMMMDDDDDDDDSSSSSSVVVVVVVRRRRRRRRRRRTTTTTTTGGGGPPPPPPPYYYYYYYYYYYYGGGGQQQQQQQQQIIIIIIIIFFFFFFFFFFFRRRRRRRRRRRPPPPPPPDDDDDDDDNNNNNNNNFFFFFFFFFFFVVVVVVVFFFFFFFFFFFGGGGQQQQQQQQQSSSSSSGGGGAAAAAGGGGNNNNNNNNNNNNNNNNWWWWWWWWWWWWWWAAAAAKKKKKKKKKGGGGHHHHHHHHHHYYYYYYYYYYYYTTTTTTTEEEEEEEEEGGGGAAAAAEEEEEEEEELLLLLLLLIIIIIIIIDDDDDDDDSSSSSSVVVVVVVLLLLLLLLDDDDDDDDVVVVVVVVVVVVVVRRRRRRRRRRRKKKKKKKKKEEEEEEEEEAAAAAEEEEEEEEENNNNNNNNCCCCCCDDDDDDDDCCCCCCLLLLLLLLQQQQQQQQQGGGGFFFFFFFFFFFQQQQQQQQQVVVVVVVCCCCCCHHHHHHHHHHSSSSSSLLLLLLLLGGGGGGGGGGGGTTTTTTTGGGGSSSSSSGGGGMMMMMMMMGGGGTTTTTTTLLLLLLLLLLLLLLLLIIIIIIIISSSSSSKKKKKKKKKIIIIIIIIRRRRRRRRRRREEEEEEEEEEEEEEEEEEYYYYYYYYYYYYPPPPPPPDDDDDDDDRRRRRRRRRRRMMMMMMMMMMMMMMMMLLLLLLLLTTTTTTTFFFFFFFFFFFSSSSSSVVVVVVVFFFFFFFFFFFPPPPPPPSSSSSSPPPPPPPKKKKKKKKKVVVVVVVSSSSSSDDDDDDDDTTTTTTTVVVVVVVVVVVVVVEEEEEEEEEPPPPPPPYYYYYYYYYYYYNNNNNNNNAAAAATTTTTTTLLLLLLLLSSSSSSVVVVVVVHHHHHHHHHHQQQQQQQQQLLLLLLLLVVVVVVVEEEEEEEEENNNNNNNNAAAAADDDDDDDDEEEEEEEEECCCCCCMMMMMMMMVVVVVVVLLLLLLLLDDDDDDDDNNNNNNNNEEEEEEEEEAAAAALLLLLLLLYYYYYYYYYYYYDDDDDDDDIIIIIIIICCCCCCFFFFFFFFFFFRRRRRRRRRRRTTTTTTTLLLLLLLLKKKKKKKKKLLLLLLLLTTTTTTTTTTTTTTPPPPPPPSSSSSSFFFFFFFFFFFGGGGDDDDDDDDLLLLLLLLNNNNNNNNHHHHHHHHHHLLLLLLLLIIIIIIIISSSSSSAAAAATTTTTTTMMMMMMMMSSSSSSGGGGVVVVVVVTTTTTTTCCCCCCCCCCCCLLLLLLLLRRRRRRRRRRRFFFFFFFFFFFPPPPPPPGGGGQQQQQQQQQLLLLLLLLNNNNNNNNSSSSSSDDDDDDDDLLLLLLLLRRRRRRRRRRRKKKKKKKKKLLLLLLLLAAAAAVVVVVVVNNNNNNNNLLLLLLLLIIIIIIIIPPPPPPPFFFFFFFFFFFPPPPPPPRRRRRRRRRRRLLLLLLLLHHHHHHHHHHFFFFFFFFFFFFFFFFFFFFFFMMMMMMMMVVVVVVVGGGGFFFFFFFFFFFAAAAAPPPPPPPLLLLLLLLTTTTTTTSSSSSSRRRRRRRRRRRGGGGSSSSSSQQQQQQQQQQQQQQQQQQYYYYYYYYYYYYRRRRRRRRRRRAAAAALLLLLLLLTTTTTTTVVVVVVVPPPPPPPEEEEEEEEELLLLLLLLTTTTTTTQQQQQQQQQQQQQQQQQQMMMMMMMMWWWWWWWWWWWWWWDDDDDDDDSSSSSSKKKKKKKKKNNNNNNNNMMMMMMMMMMMMMMMMCCCCCCAAAAAAAAAADDDDDDDDPPPPPPPRRRRRRRRRRRHHHHHHHHHHGGGGRRRRRRRRRRRYYYYYYYYYYYYLLLLLLLLTTTTTTTAAAAASSSSSSAAAAAMMMMMMMMFFFFFFFFFFFRRRRRRRRRRRGGGGKKKKKKKKKMMMMMMMMSSSSSSTTTTTTTKKKKKKKKKEEEEEEEEEVVVVVVVDDDDDDDDEEEEEEEEEQQQQQQQQQMMMMMMMMIIIIIIIINNNNNNNNVVVVVVVQQQQQQQQQNNNNNNNNKKKKKKKKKNNNNNNNNSSSSSSSSSSSSYYYYYYYYYYYYFFFFFFFFFFFVVVVVVVEEEEEEEEEWWWWWWWWWWWWWWIIIIIIIIPPPPPPPNNNNNNNNNNNNNNNNVVVVVVVKKKKKKKKKSSSSSSSSSSSSVVVVVVVCCCCCCDDDDDDDDIIIIIIIIPPPPPPPPPPPPPPTTTTTTTGGGGLLLLLLLLSSSSSSMMMMMMMMAAAAASSSSSSTTTTTTTFFFFFFFFFFFIIIIIIIIGGGGNNNNNNNNSSSSSSTTTTTTTSSSSSSIIIIIIIIQQQQQQQQQEEEEEEEEEMMMMMMMMFFFFFFFFFFFRRRRRRRRRRRRRRRRRRRRRRVVVVVVVSSSSSSEEEEEEEEEQQQQQQQQQFFFFFFFFFFFTTTTTTTAAAAAMMMMMMMMFFFFFFFFFFFRRRRRRRRRRRRRRRRRRRRRRKKKKKKKKKAAAAAFFFFFFFFFFFLLLLLLLLHHHHHHHHHHWWWWWWWWWWWWWWYYYYYYYYYYYYTTTTTTTGGGGEEEEEEEEEGGGGMMMMMMMMDDDDDDDDEEEEEEEEEMMMMMMMMEEEEEEEEEFFFFFFFFFFFTTTTTTTEEEEEEEEEAAAAAEEEEEEEEESSSSSSNNNNNNNNMMMMMMMMNNNNNNNNDDDDDDDDLLLLLLLLVVVVVVVSSSSSSEEEEEEEEEYYYYYYYYYYYYQQQQQQQQQQQQQQQQQQYYYYYYYYYYYYQQQQQQQQQDDDDDDDDAAAAATTTTTTTAAAAADDDDDDDDEEEEEEEEEEEEEEEEEEGGGGEEEEEEEEEYYYYYYYYYYYYEEEEEEEEEDDDDDDDDEEEEEEEEEEEEEEEEEEEEEEEEEEEDDDDDDDDLLLLLLLLQQQQQQQQQAAAAAEEEEEEEEEDDDDDDDDMMMMMMMMM

SEQ ID NO: 109 - protein, 3519 aa, Brugia pahangi
MMMMMMMMRRRRRRRRRRREEEEEEEEEIIIIIIIIVVVVVVVHHHHHHHHHHVVVVVVVQQQQQQQQQAAAAAGGGGQQQQQQQQQCCCCCCGGGGNNNNNNNNQQQQQQQQQIIIIIIIIGGGGAAAAAKKKKKKKKKFFFFFFFFFFFWWWWWWWWWWWWWWEEEEEEEEEVVVVVVVIIIIIIIISSSSSSDDDDDDDDEEEEEEEEEHHHHHHHHHHGGGGVVVVVVVQQQQQQQQQPPPPPPPDDDDDDDDGGGGTTTTTTTYYYYYYYYYYYYKKKKKKKKKGGGGDDDDDDDDSSSSSSDDDDDDDDLLLLLLLLQQQQQQQQQIIIIIIIIEEEEEEEEERRRRRRRRRRRIIIIIIIINNNNNNNNVVVVVVVYYYYYYYYYYYYYYYYYYYYYYYYNNNNNNNNEEEEEEEEEAAAAANNNNNNNNGGGGGGGGKKKKKKKKKYYYYYYYYYYYYVVVVVVVPPPPPPPRRRRRRRRRRRAAAAAVVVVVVVLLLLLLLLVVVVVVVDDDDDDDDLLLLLLLLEEEEEEEEEPPPPPPPGGGGTTTTTTTMMMMMMMMDDDDDDDDSSSSSSIIIIIIIIRRRRRRRRRRRGGGGGGGGEEEEEEEEEFFFFFFFFFFFGGGGQQQQQQQQQLLLLLLLLFFFFFFFFFFFRRRRRRRRRRRPPPPPPPDDDDDDDDNNNNNNNNFFFFFFFFFFFVVVVVVVFFFFFFFFFFFGGGGQQQQQQQQQSSSSSSGGGGAAAAAGGGGNNNNNNNNNNNNNNNNWWWWWWWWWWWWWWAAAAAKKKKKKKKKGGGGHHHHHHHHHHYYYYYYYYYYYYTTTTTTTEEEEEEEEEGGGGAAAAAEEEEEEEEELLLLLLLLVVVVVVVDDDDDDDDNNNNNNNNVVVVVVVLLLLLLLLDDDDDDDDVVVVVVVIIIIIIIIRRRRRRRRRRRKKKKKKKKKEEEEEEEEEAAAAAEEEEEEEEEGGGGCCCCCCDDDDDDDDCCCCCCLLLLLLLLQQQQQQQQQGGGGFFFFFFFFFFFQQQQQQQQQLLLLLLLLTTTTTTTHHHHHHHHHHSSSSSSLLLLLLLLGGGGGGGGGGGGTTTTTTTGGGGSSSSSSGGGGMMMMMMMMGGGGTTTTTTTLLLLLLLLLLLLLLLLIIIIIIIISSSSSSKKKKKKKKKIIIIIIIIRRRRRRRRRRREEEEEEEEEEEEEEEEEEYYYYYYYYYYYYPPPPPPPDDDDDDDDRRRRRRRRRRRIIIIIIIIMMMMMMMMSSSSSSSSSSSSFFFFFFFFFFFSSSSSSVVVVVVVVVVVVVVPPPPPPPSSSSSSPPPPPPPKKKKKKKKKVVVVVVVSSSSSSDDDDDDDDVVVVVVVVVVVVVVLLLLLLLLEEEEEEEEEPPPPPPPYYYYYYYYYYYYNNNNNNNNAAAAATTTTTTTLLLLLLLLSSSSSSVVVVVVVHHHHHHHHHHQQQQQQQQQLLLLLLLLVVVVVVVEEEEEEEEENNNNNNNNTTTTTTTDDDDDDDDEEEEEEEEETTTTTTTFFFFFFFFFFFCCCCCCIIIIIIIIDDDDDDDDNNNNNNNNEEEEEEEEEAAAAALLLLLLLLYYYYYYYYYYYYDDDDDDDDIIIIIIIICCCCCCFFFFFFFFFFFRRRRRRRRRRRTTTTTTTLLLLLLLLKKKKKKKKKLLLLLLLLAAAAANNNNNNNNPPPPPPPTTTTTTTYYYYYYYYYYYYGGGGDDDDDDDDLLLLLLLLNNNNNNNNHHHHHHHHHHLLLLLLLLVVVVVVVSSSSSSVVVVVVVTTTTTTTMMMMMMMMSSSSSSGGGGVVVVVVVTTTTTTTTTTTTTTCCCCCCLLLLLLLLRRRRRRRRRRRFFFFFFFFFFFPPPPPPPGGGGQQQQQQQQQLLLLLLLLNNNNNNNNAAAAADDDDDDDDLLLLLLLLRRRRRRRRRRRKKKKKKKKKLLLLLLLLAAAAAVVVVVVVNNNNNNNNMMMMMMMMVVVVVVVPPPPPPPFFFFFFFFFFFPPPPPPPRRRRRRRRRRRLLLLLLLLHHHHHHHHHHFFFFFFFFFFFFFFFFFFFFFFMMMMMMMMPPPPPPPGGGGFFFFFFFFFFFAAAAAPPPPPPPLLLLLLLLSSSSSSAAAAARRRRRRRRRRRDDDDDDDDAAAAAAAAAAAAAAAYYYYYYYYYYYYRRRRRRRRRRRAAAAALLLLLLLLNNNNNNNNVVVVVVVAAAAAEEEEEEEEELLLLLLLLTTTTTTTQQQQQQQQQQQQQQQQQQMMMMMMMMFFFFFFFFFFFDDDDDDDDAAAAAKKKKKKKKKNNNNNNNNMMMMMMMMMMMMMMMMAAAAAAAAAACCCCCCDDDDDDDDPPPPPPPRRRRRRRRRRRHHHHHHHHHHGGGGRRRRRRRRRRRYYYYYYYYYYYYLLLLLLLLTTTTTTTVVVVVVVAAAAAAAAAAMMMMMMMMFFFFFFFFFFFRRRRRRRRRRRGGGGRRRRRRRRRRRMMMMMMMMSSSSSSMMMMMMMMRRRRRRRRRRREEEEEEEEEVVVVVVVDDDDDDDDEEEEEEEEEQQQQQQQQQMMMMMMMMMMMMMMMMQQQQQQQQQVVVVVVVQQQQQQQQQNNNNNNNNKKKKKKKKKNNNNNNNNSSSSSSSSSSSSYYYYYYYYYYYYFFFFFFFFFFFVVVVVVVEEEEEEEEEWWWWWWWWWWWWWWIIIIIIIIPPPPPPPNNNNNNNNNNNNNNNNVVVVVVVKKKKKKKKKTTTTTTTAAAAAVVVVVVVCCCCCCDDDDDDDDIIIIIIIIPPPPPPPPPPPPPPRRRRRRRRRRRGGGGLLLLLLLLKKKKKKKKKMMMMMMMMSSSSSSAAAAATTTTTTTFFFFFFFFFFFIIIIIIIIGGGGNNNNNNNNTTTTTTTTTTTTTTAAAAAIIIIIIIIQQQQQQQQQEEEEEEEEELLLLLLLLFFFFFFFFFFFKKKKKKKKKRRRRRRRRRRRIIIIIIIISSSSSSEEEEEEEEEQQQQQQQQQFFFFFFFFFFFTTTTTTTAAAAAMMMMMMMMFFFFFFFFFFFRRRRRRRRRRRRRRRRRRRRRRKKKKKKKKKAAAAAFFFFFFFFFFFLLLLLLLLHHHHHHHHHHWWWWWWWWWWWWWWYYYYYYYYYYYYTTTTTTTGGGGEEEEEEEEEGGGGMMMMMMMMDDDDDDDDEEEEEEEEEMMMMMMMMEEEEEEEEEFFFFFFFFFFFTTTTTTTEEEEEEEEEAAAAAEEEEEEEEESSSSSSNNNNNNNNMMMMMMMMNNNNNNNNDDDDDDDDLLLLLLLLVVVVVVVSSSSSSEEEEEEEEEYYYYYYYYYYYYQQQQQQQQQQQQQQQQQQYYYYYYYYYYYYQQQQQQQQQDDDDDDDDAAAAATTTTTTTAAAAADDDDDDDDEEEEEEEEEEEEEEEEEEGGGGDDDDDDDDLLLLLLLLQQQQQQQQQEEEEEEEEEGGGGEEEEEEEEESSSSSSEEEEEEEEEYYYYYYYYYYYYIIIIIIIIEEEEEEEEEQQQQQQQQQEEEEEEEEEEEEEEEEEEE

SEQ ID NO: 110 - protein, 3500 aa, Gallus gallus
MMMMMMMMRRRRRRRRRRREEEEEEEEEIIIIIIIIVVVVVVVHHHHHHHHHHIIIIIIIIQQQQQQQQQAAAAAGGGGQQQQQQQQQCCCCCCGGGGNNNNNNNNQQQQQQQQQIIIIIIIIGGGGAAAAAKKKKKKKKKFFFFFFFFFFFWWWWWWWWWWWWWWEEEEEEEEEVVVVVVVIIIIIIIISSSSSSDDDDDDDDEEEEEEEEEHHHHHHHHHHGGGGIIIIIIIIDDDDDDDDPPPPPPPTTTTTTTGGGGSSSSSSYYYYYYYYYYYYHHHHHHHHHHGGGGDDDDDDDDSSSSSSDDDDDDDDLLLLLLLLQQQQQQQQQLLLLLLLLEEEEEEEEERRRRRRRRRRRIIIIIIIINNNNNNNNVVVVVVVYYYYYYYYYYYYYYYYYYYYYYYYNNNNNNNNEEEEEEEEEAAAAAAAAAAGGGGNNNNNNNNKKKKKKKKKYYYYYYYYYYYYVVVVVVVPPPPPPPRRRRRRRRRRRAAAAAIIIIIIIILLLLLLLLVVVVVVVDDDDDDDDLLLLLLLLEEEEEEEEEPPPPPPPGGGGTTTTTTTMMMMMMMMDDDDDDDDSSSSSSVVVVVVVRRRRRRRRRRRSSSSSSGGGGPPPPPPPFFFFFFFFFFFGGGGQQQQQQQQQIIIIIIIIFFFFFFFFFFFRRRRRRRRRRRPPPPPPPDDDDDDDDNNNNNNNNFFFFFFFFFFFVVVVVVVFFFFFFFFFFFGGGGQQQQQQQQQSSSSSSGGGGAAAAAGGGGNNNNNNNNNNNNNNNNWWWWWWWWWWWWWWAAAAAKKKKKKKKKGGGGHHHHHHHHHHYYYYYYYYYYYYTTTTTTTEEEEEEEEEGGGGAAAAAEEEEEEEEELLLLLLLLVVVVVVVDDDDDDDDSSSSSSVVVVVVVLLLLLLLLDDDDDDDDVVVVVVVVVVVVVVRRRRRRRRRRRKKKKKKKKKEEEEEEEEESSSSSSEEEEEEEEESSSSSSCCCCCCDDDDDDDDCCCCCCLLLLLLLLQQQQQQQQQGGGGFFFFFFFFFFFQQQQQQQQQLLLLLLLLTTTTTTTHHHHHHHHHHSSSSSSLLLLLLLLGGGGGGGGGGGGTTTTTTTGGGGSSSSSSGGGGMMMMMMMMGGGGTTTTTTTLLLLLLLLLLLLLLLLIIIIIIIISSSSSSKKKKKKKKKIIIIIIIIRRRRRRRRRRREEEEEEEEEEEEEEEEEEYYYYYYYYYYYYPPPPPPPDDDDDDDDRRRRRRRRRRRIIIIIIIIMMMMMMMMNNNNNNNNTTTTTTTFFFFFFFFFFFSSSSSSVVVVVVVMMMMMMMMPPPPPPPSSSSSSPPPPPPPKKKKKKKKKVVVVVVVSSSSSSDDDDDDDDTTTTTTTVVVVVVVVVVVVVVEEEEEEEEEPPPPPPPYYYYYYYYYYYYNNNNNNNNAAAAATTTTTTTVVVVVVVSSSSSSVVVVVVVHHHHHHHHHHQQQQQQQQQLLLLLLLLVVVVVVVEEEEEEEEENNNNNNNNTTTTTTTDDDDDDDDEEEEEEEEETTTTTTTYYYYYYYYYYYYCCCCCCIIIIIIIIDDDDDDDDNNNNNNNNEEEEEEEEEAAAAALLLLLLLLYYYYYYYYYYYYDDDDDDDDIIIIIIIICCCCCCFFFFFFFFFFFRRRRRRRRRRRTTTTTTTLLLLLLLLKKKKKKKKKLLLLLLLLTTTTTTTTTTTTTTPPPPPPPTTTTTTTYYYYYYYYYYYYGGGGDDDDDDDDLLLLLLLLNNNNNNNNHHHHHHHHHHLLLLLLLLVVVVVVVSSSSSSAAAAATTTTTTTMMMMMMMMSSSSSSGGGGVVVVVVVTTTTTTTTTTTTTTCCCCCCLLLLLLLLRRRRRRRRRRRFFFFFFFFFFFPPPPPPPGGGGQQQQQQQQQLLLLLLLLNNNNNNNNAAAAADDDDDDDDLLLLLLLLRRRRRRRRRRRKKKKKKKKKLLLLLLLLAAAAAVVVVVVVNNNNNNNNMMMMMMMMVVVVVVVPPPPPPPFFFFFFFFFFFPPPPPPPRRRRRRRRRRRLLLLLLLLHHHHHHHHHHFFFFFFFFFFFFFFFFFFFFFFMMMMMMMMPPPPPPPGGGGFFFFFFFFFFFAAAAAPPPPPPPLLLLLLLLTTTTTTTSSSSSSRRRRRRRRRRRGGGGSSSSSSQQQQQQQQQQQQQQQQQQYYYYYYYYYYYYRRRRRRRRRRRAAAAALLLLLLLLTTTTTTTVVVVVVVPPPPPPPEEEEEEEEELLLLLLLLTTTTTTTQQQQQQQQQQQQQQQQQQMMMMMMMMFFFFFFFFFFFDDDDDDDDSSSSSSKKKKKKKKKNNNNNNNNMMMMMMMMMMMMMMMMAAAAAAAAAACCCCCCDDDDDDDDPPPPPPPRRRRRRRRRRRHHHHHHHHHHGGGGRRRRRRRRRRRYYYYYYYYYYYYLLLLLLLLTTTTTTTVVVVVVVAAAAAAAAAAIIIIIIIIFFFFFFFFFFFRRRRRRRRRRRGGGGRRRRRRRRRRRMMMMMMMMSSSSSSMMMMMMMMKKKKKKKKKEEEEEEEEEVVVVVVVDDDDDDDDEEEEEEEEEQQQQQQQQQMMMMMMMMLLLLLLLLNNNNNNNNVVVVVVVQQQQQQQQQNNNNNNNNKKKKKKKKKNNNNNNNNSSSSSSSSSSSSYYYYYYYYYYYYFFFFFFFFFFFVVVVVVVEEEEEEEEEWWWWWWWWWWWWWWIIIIIIIIPPPPPPPNNNNNNNNNNNNNNNNVVVVVVVKKKKKKKKKTTTTTTTAAAAAVVVVVVVCCCCCCDDDDDDDDIIIIIIIIPPPPPPPPPPPPPPRRRRRRRRRRRGGGGLLLLLLLLKKKKKKKKKMMMMMMMMSSSSSSAAAAATTTTTTTFFFFFFFFFFFIIIIIIIIGGGGNNNNNNNNSSSSSSTTTTTTTAAAAAIIIIIIIIQQQQQQQQQEEEEEEEEELLLLLLLLFFFFFFFFFFFKKKKKKKKKRRRRRRRRRRRIIIIIIIISSSSSSEEEEEEEEEQQQQQQQQQFFFFFFFFFFFTTTTTTTAAAAAMMMMMMMMFFFFFFFFFFFRRRRRRRRRRRRRRRRRRRRRRKKKKKKKKKAAAAAFFFFFFFFFFFLLLLLLLLHHHHHHHHHHWWWWWWWWWWWWWWYYYYYYYYYYYYTTTTTTTGGGGEEEEEEEEEGGGGMMMMMMMMDDDDDDDDEEEEEEEEEMMMMMMMMEEEEEEEEEFFFFFFFFFFFTTTTTTTEEEEEEEEEAAAAAEEEEEEEEESSSSSSNNNNNNNNMMMMMMMMNNNNNNNNDDDDDDDDLLLLLLLLVVVVVVVSSSSSSEEEEEEEEEYYYYYYYYYYYYQQQQQQQQQQQQQQQQQQYYYYYYYYYYYYQQQQQQQQQDDDDDDDDAAAAATTTTTTTAAAAADDDDDDDDEEEEEEEEEQQQQQQQQQGGGGEEEEEEEEEFFFFFFFFFFFEEEEEEEEEEEEEEEEEEEEEEEEEEEGGGGEEEEEEEEEEEEEEEEEEDDDDDDDDEEEEEEEEEAAAAAA

SEQ ID NO: 111 - protein, 3537 aa, Chondrus crispus
MMMMMMMMTTTTTTTRRRRRRRRRRRSSSSSSIIIIIIIIVVVVVVVSSSSSSLLLLLLLLQQQQQQQQQVVVVVVVGGGGQQQQQQQQQCCCCCCGGGGNNNNNNNNQQQQQQQQQVVVVVVVGGGGLLLLLLLLKKKKKKKKKFFFFFFFFFFFWWWWWWWWWWWWWWEEEEEEEEEGGGGIIIIIIIISSSSSSAAAAAEEEEEEEEEHHHHHHHHHHGGGGIIIIIIIIDDDDDDDDVVVVVVVDDDDDDDDGGGGKKKKKKKKKYYYYYYYYYYYYIIIIIIIIGGGGDDDDDDDDRRRRRRRRRRRPPPPPPPDDDDDDDDQQQQQQQQQEEEEEEEEELLLLLLLLHHHHHHHHHHRRRRRRRRRRRIIIIIIIIGGGGVVVVVVVYYYYYYYYYYYYYYYYYYYYYYYYNNNNNNNNEEEEEEEEESSSSSSSSSSSSSSSSSSGGGGSSSSSSYYYYYYYYYYYYVVVVVVVPPPPPPPRRRRRRRRRRRAAAAAAAAAAMMMMMMMMLLLLLLLLDDDDDDDDLLLLLLLLEEEEEEEEEPPPPPPPGGGGVVVVVVVLLLLLLLLMMMMMMMMAAAAAIIIIIIIIKKKKKKKKKNNNNNNNNSSSSSSKKKKKKKKKRRRRRRRRRRRGGGGQQQQQQQQQLLLLLLLLFFFFFFFFFFFHHHHHHHHHHPPPPPPPDDDDDDDDNNNNNNNNFFFFFFFFFFFAAAAAYYYYYYYYYYYYGGGGQQQQQQQQQSSSSSSGGGGAAAAAGGGGNNNNNNNNNNNNNNNNWWWWWWWWWWWWWWAAAAAKKKKKKKKKGGGGHHHHHHHHHHYYYYYYYYYYYYTTTTTTTEEEEEEEEEGGGGAAAAAEEEEEEEEELLLLLLLLVVVVVVVEEEEEEEEETTTTTTTAAAAALLLLLLLLDDDDDDDDIIIIIIIIIIIIIIIIRRRRRRRRRRRRRRRRRRRRRREEEEEEEEEAAAAAEEEEEEEEETTTTTTTCCCCCCDDDDDDDDVVVVVVVLLLLLLLLQQQQQQQQQGGGGFFFFFFFFFFFQQQQQQQQQVVVVVVVTTTTTTTHHHHHHHHHHSSSSSSLLLLLLLLGGGGGGGGGGGGTTTTTTTGGGGSSSSSSGGGGMMMMMMMMGGGGTTTTTTTLLLLLLLLLLLLLLLLVVVVVVVSSSSSSKKKKKKKKKIIIIIIIIRRRRRRRRRRREEEEEEEEEEEEEEEEEEYYYYYYYYYYYYPPPPPPPDDDDDDDDRRRRRRRRRRRMMMMMMMMMMMMMMMMCCCCCCTTTTTTTYYYYYYYYYYYYSSSSSSVVVVVVVLLLLLLLLPPPPPPPSSSSSSPPPPPPPKKKKKKKKKVVVVVVVSSSSSSDDDDDDDDTTTTTTTVVVVVVVVVVVVVVEEEEEEEEEPPPPPPPYYYYYYYYYYYYNNNNNNNNCCCCCCTTTTTTTLLLLLLLLSSSSSSIIIIIIIIHHHHHHHHHHQQQQQQQQQLLLLLLLLIIIIIIIIEEEEEEEEENNNNNNNNAAAAADDDDDDDDCCCCCCVVVVVVVFFFFFFFFFFFAAAAAIIIIIIIIDDDDDDDDNNNNNNNNEEEEEEEEEAAAAALLLLLLLLYYYYYYYYYYYYNNNNNNNNIIIIIIIICCCCCCYYYYYYYYYYYYNNNNNNNNTTTTTTTLLLLLLLLKKKKKKKKKIIIIIIIIEEEEEEEEEQQQQQQQQQPPPPPPPSSSSSSYYYYYYYYYYYYDDDDDDDDEEEEEEEEELLLLLLLLNNNNNNNNSSSSSSLLLLLLLLIIIIIIIISSSSSSSSSSSSVVVVVVVMMMMMMMMSSSSSSGGGGIIIIIIIITTTTTTTCCCCCCSSSSSSLLLLLLLLRRRRRRRRRRRFFFFFFFFFFFPPPPPPPGGGGQQQQQQQQQLLLLLLLLNNNNNNNNAAAAADDDDDDDDLLLLLLLLRRRRRRRRRRRKKKKKKKKKLLLLLLLLAAAAAVVVVVVVNNNNNNNNLLLLLLLLVVVVVVVPPPPPPPFFFFFFFFFFFPPPPPPPRRRRRRRRRRRLLLLLLLLHHHHHHHHHHFFFFFFFFFFFFFFFFFFFFFFAAAAAVVVVVVVGGGGHHHHHHHHHHAAAAAPPPPPPPLLLLLLLLAAAAAAAAAASSSSSSNNNNNNNNSSSSSSAAAAAGGGGYYYYYYYYYYYYRRRRRRRRRRRSSSSSSLLLLLLLLSSSSSSVVVVVVVPPPPPPPEEEEEEEEELLLLLLLLAAAAAGGGGQQQQQQQQQMMMMMMMMFFFFFFFFFFFDDDDDDDDRRRRRRRRRRRNNNNNNNNNNNNNNNNMMMMMMMMMMMMMMMMAAAAAEEEEEEEEEIIIIIIIIDDDDDDDDPPPPPPPRRRRRRRRRRREEEEEEEEEGGGGRRRRRRRRRRRYYYYYYYYYYYYLLLLLLLLTTTTTTTAAAAAAAAAAVVVVVVVYYYYYYYYYYYYFFFFFFFFFFFRRRRRRRRRRRGGGGKKKKKKKKKVVVVVVVSSSSSSTTTTTTTKKKKKKKKKEEEEEEEEEVVVVVVVEEEEEEEEEDDDDDDDDEEEEEEEEEMMMMMMMMTTTTTTTLLLLLLLLMMMMMMMMQQQQQQQQQTTTTTTTKKKKKKKKKNNNNNNNNSSSSSSAAAAAYYYYYYYYYYYYFFFFFFFFFFFVVVVVVVEEEEEEEEEWWWWWWWWWWWWWWIIIIIIIIPPPPPPPHHHHHHHHHHNNNNNNNNIIIIIIIIKKKKKKKKKTTTTTTTSSSSSSVVVVVVVCCCCCCDDDDDDDDIIIIIIIIPPPPPPPAAAAAAAAAAGGGGEEEEEEEEEKKKKKKKKKIIIIIIIISSSSSSSSSSSSAAAAAFFFFFFFFFFFIIIIIIIIGGGGNNNNNNNNTTTTTTTTTTTTTTAAAAAIIIIIIIIEEEEEEEEEAAAAATTTTTTTFFFFFFFFFFFKKKKKKKKKRRRRRRRRRRRFFFFFFFFFFFGGGGNNNNNNNNQQQQQQQQQFFFFFFFFFFFRRRRRRRRRRRSSSSSSMMMMMMMMFFFFFFFFFFFRRRRRRRRRRRRRRRRRRRRRRKKKKKKKKKAAAAAFFFFFFFFFFFLLLLLLLLHHHHHHHHHHWWWWWWWWWWWWWWYYYYYYYYYYYYKKKKKKKKKSSSSSSEEEEEEEEEGGGGMMMMMMMMDDDDDDDDEEEEEEEEELLLLLLLLEEEEEEEEEFFFFFFFFFFFSSSSSSEEEEEEEEEAAAAAEEEEEEEEESSSSSSNNNNNNNNLLLLLLLLAAAAADDDDDDDDLLLLLLLLVVVVVVVSSSSSSEEEEEEEEEYYYYYYYYYYYYQQQQQQQQQQQQQQQQQQYYYYYYYYYYYYGGGGEEEEEEEEEAAAAATTTTTTTAAAAADDDDDDDDGGGGVVVVVVVEEEEEEEEEGGGGYYYYYYYYYYYYEEEEEEEEEEEEEEEEEEEEEEEEEEEGGGGYYYYYYYYYYYYEEEEEEEEENNNNNNNNDDDDDDDDHHHHHHHHHHPPPPPPPEEEEEEEEEDDDDDDDDDDDDDDDDEEEEEEEEEEEEEEEEEEE

SEQ ID NO: 112 - protein, 3520 aa, Glomerella cingulata
MMMMMMMMRRRRRRRRRRREEEEEEEEEIIIIIIIIIIIIIIIIHHHHHHHHHHLLLLLLLLQQQQQQQQQTTTTTTTGGGGQQQQQQQQQCCCCCCLLLLLLLLIIIIIIIIQQQQQQQQQGGGGNNNNNNNNQQQQQQQQQVVVVVVVGGGGTTTTTTTAAAAAFFFFFFFFFFFWWWWWWWWWWWWWWQQQQQQQQQTTTTTTTIIIIIIIIHHHHHHHHHHHHHHHHHHHHEEEEEEEEEHHHHHHHHHHGGGGLLLLLLLLDDDDDDDDHHHHHHHHHHDDDDDDDDGGGGYYYYYYYYYYYYFFFFFFFFFFFRRRRRRRRRRRGGGGEEEEEEEEESSSSSSTTTTTTTQQQQQQQQQQQQQQQQQQSSSSSSDDDDDDDDRRRRRRRRRRRLLLLLLLLSSSSSSVVVVVVVYYYYYYYYYYYYFFFFFFFFFFFAAAAAEEEEEEEEEAAAAASSSSSSNNNNNNNNNNNNNNNNKKKKKKKKKYYYYYYYYYYYYVVVVVVVPPPPPPPRRRRRRRRRRRAAAAAVVVVVVVLLLLLLLLVVVVVVVDDDDDDDDLLLLLLLLEEEEEEEEEPPPPPPPAAAAATTTTTTTMMMMMMMMDDDDDDDDAAAAAIIIIIIIIRRRRRRRRRRRSSSSSSGGGGPPPPPPPLLLLLLLLGGGGNNNNNNNNFFFFFFFFFFFFFFFFFFFFFFRRRRRRRRRRRPPPPPPPDDDDDDDDNNNNNNNNMMMMMMMMVVVVVVVHHHHHHHHHHGGGGQQQQQQQQQSSSSSSGGGGAAAAAGGGGNNNNNNNNNNNNNNNNWWWWWWWWWWWWWWAAAAAKKKKKKKKKGGGGHHHHHHHHHHYYYYYYYYYYYYTTTTTTTEEEEEEEEEGGGGAAAAAEEEEEEEEELLLLLLLLVVVVVVVDDDDDDDDQQQQQQQQQVVVVVVVLLLLLLLLDDDDDDDDVVVVVVVVVVVVVVRRRRRRRRRRRRRRRRRRRRRREEEEEEEEEAAAAAEEEEEEEEETTTTTTTCCCCCCDDDDDDDDSSSSSSLLLLLLLLQQQQQQQQQGGGGFFFFFFFFFFFQQQQQQQQQIIIIIIIITTTTTTTHHHHHHHHHHSSSSSSLLLLLLLLGGGGGGGGGGGGTTTTTTTGGGGSSSSSSGGGGMMMMMMMMGGGGTTTTTTTLLLLLLLLLLLLLLLLIIIIIIIIAAAAAKKKKKKKKKVVVVVVVRRRRRRRRRRREEEEEEEEEEEEEEEEEEFFFFFFFFFFFPPPPPPPDDDDDDDDRRRRRRRRRRRMMMMMMMMMMMMMMMMAAAAATTTTTTTFFFFFFFFFFFSSSSSSVVVVVVVLLLLLLLLPPPPPPPSSSSSSPPPPPPPKKKKKKKKKVVVVVVVSSSSSSEEEEEEEEEVVVVVVVVVVVVVVVVVVVVVEEEEEEEEEPPPPPPPYYYYYYYYYYYYNNNNNNNNAAAAATTTTTTTLLLLLLLLSSSSSSVVVVVVVHHHHHHHHHHQQQQQQQQQLLLLLLLLVVVVVVVEEEEEEEEENNNNNNNNSSSSSSDDDDDDDDEEEEEEEEETTTTTTTFFFFFFFFFFFCCCCCCIIIIIIIIDDDDDDDDNNNNNNNNEEEEEEEEEAAAAALLLLLLLLYYYYYYYYYYYYDDDDDDDDIIIIIIIICCCCCCRRRRRRRRRRRRRRRRRRRRRRTTTTTTTLLLLLLLLKKKKKKKKKQQQQQQQQQAAAAAHHHHHHHHHHPPPPPPPSSSSSSYYYYYYYYYYYYGGGGDDDDDDDDLLLLLLLLNNNNNNNNKKKKKKKKKLLLLLLLLVVVVVVVSSSSSSRRRRRRRRRRRVVVVVVVMMMMMMMMSSSSSSGGGGLLLLLLLLTTTTTTTTTTTTTTGGGGFFFFFFFFFFFRRRRRRRRRRRFFFFFFFFFFFPPPPPPPGGGGQQQQQQQQQLLLLLLLLNNNNNNNNAAAAADDDDDDDDLLLLLLLLRRRRRRRRRRRKKKKKKKKKLLLLLLLLAAAAAVVVVVVVNNNNNNNNLLLLLLLLVVVVVVVPPPPPPPFFFFFFFFFFFPPPPPPPRRRRRRRRRRRLLLLLLLLHHHHHHHHHHFFFFFFFFFFFFFFFFFFFFFFTTTTTTTVVVVVVVGGGGFFFFFFFFFFFAAAAAPPPPPPPLLLLLLLLTTTTTTTTTTTTTTAAAAAAAAAAAAAAAYYYYYYYYYYYYQQQQQQQQQNNNNNNNNLLLLLLLLGGGGVVVVVVVAAAAAEEEEEEEEELLLLLLLLTTTTTTTQQQQQQQQQQQQQQQQQQMMMMMMMMFFFFFFFFFFFDDDDDDDDPPPPPPPKKKKKKKKKNNNNNNNNVVVVVVVMMMMMMMMSSSSSSAAAAASSSSSSDDDDDDDDFFFFFFFFFFFRRRRRRRRRRRNNNNNNNNGGGGRRRRRRRRRRRFFFFFFFFFFFLLLLLLLLTTTTTTTCCCCCCSSSSSSAAAAAIIIIIIIIYYYYYYYYYYYYRRRRRRRRRRRGGGGKKKKKKKKKVVVVVVVSSSSSSTTTTTTTKKKKKKKKKQQQQQQQQQIIIIIIIIEEEEEEEEEEEEEEEEEEQQQQQQQQQIIIIIIIIRRRRRRRRRRRGGGGVVVVVVVQQQQQQQQQAAAAAKKKKKKKKKNNNNNNNNSSSSSSAAAAAYYYYYYYYYYYYFFFFFFFFFFFVVVVVVVEEEEEEEEEWWWWWWWWWWWWWWIIIIIIIIPPPPPPPNNNNNNNNNNNNNNNNVVVVVVVQQQQQQQQQTTTTTTTAAAAAHHHHHHHHHHCCCCCCSSSSSSIIIIIIIIPPPPPPPPPPPPPPVVVVVVVGGGGMMMMMMMMNNNNNNNNAAAAASSSSSSSSSSSSTTTTTTTFFFFFFFFFFFIIIIIIIIGGGGNNNNNNNNSSSSSSTTTTTTTAAAAAIIIIIIIIQQQQQQQQQDDDDDDDDIIIIIIIIFFFFFFFFFFFRRRRRRRRRRRRRRRRRRRRRRVVVVVVVGGGGDDDDDDDDQQQQQQQQQFFFFFFFFFFFSSSSSSVVVVVVVMMMMMMMMFFFFFFFFFFFRRRRRRRRRRRRRRRRRRRRRRKKKKKKKKKAAAAAFFFFFFFFFFFLLLLLLLLHHHHHHHHHHWWWWWWWWWWWWWWYYYYYYYYYYYYTTTTTTTGGGGEEEEEEEEEGGGGMMMMMMMMDDDDDDDDEEEEEEEEEMMMMMMMMEEEEEEEEEFFFFFFFFFFFTTTTTTTEEEEEEEEEAAAAAEEEEEEEEESSSSSSNNNNNNNNMMMMMMMMNNNNNNNNDDDDDDDDLLLLLLLLVVVVVVVSSSSSSEEEEEEEEEYYYYYYYYYYYYQQQQQQQQQQQQQQQQQQYYYYYYYYYYYYQQQQQQQQQDDDDDDDDAAAAAGGGGMMMMMMMMDDDDDDDDDDDDDDDDDDDDDDDDEEEEEEEEEAAAAAEEEEEEEEEEEEEEEEEEAAAAAYYYYYYYYYYYYEEEEEEEEEEEEEEEEEEEEEEEEEEEEEEEEEEEEPPPPPPPVVVVVVVEEEEEEEEEEEEEEEEEEE

SEQ ID NO: 113 - protein, 3493 aa, Glomerella graminicola
MMMMMMMMRRRRRRRRRRREEEEEEEEEIIIIIIIIIIIIIIIIHHHHHHHHHHLLLLLLLLQQQQQQQQQTTTTTTTGGGGQQQQQQQQQCCCCCCGGGGNNNNNNNNQQQQQQQQQVVVVVVVGGGGTTTTTTTAAAAAFFFFFFFFFFFWWWWWWWWWWWWWWQQQQQQQQQTTTTTTTIIIIIIIIHHHHHHHHHHGGGGEEEEEEEEEHHHHHHHHHHGGGGLLLLLLLLDDDDDDDDQQQQQQQQQDDDDDDDDGGGGVVVVVVVFFFFFFFFFFFRRRRRRRRRRRGGGGSSSSSSDDDDDDDDEEEEEEEEEQQQQQQQQQQQQQQQQQQSSSSSSEEEEEEEEERRRRRRRRRRRLLLLLLLLSSSSSSVVVVVVVYYYYYYYYYYYYFFFFFFFFFFFTTTTTTTEEEEEEEEEAAAAAAAAAAKKKKKKKKKQQQQQQQQQKKKKKKKKKYYYYYYYYYYYYVVVVVVVPPPPPPPRRRRRRRRRRRAAAAAVVVVVVVLLLLLLLLVVVVVVVDDDDDDDDLLLLLLLLEEEEEEEEEPPPPPPPAAAAATTTTTTTMMMMMMMMDDDDDDDDAAAAAIIIIIIIIRRRRRRRRRRRSSSSSSGGGGPPPPPPPLLLLLLLLGGGGDDDDDDDDFFFFFFFFFFFFFFFFFFFFFFRRRRRRRRRRRPPPPPPPDDDDDDDDNNNNNNNNMMMMMMMMVVVVVVVYYYYYYYYYYYYGGGGQQQQQQQQQSSSSSSGGGGAAAAAGGGGNNNNNNNNNNNNNNNNWWWWWWWWWWWWWWAAAAAKKKKKKKKKGGGGHHHHHHHHHHYYYYYYYYYYYYTTTTTTTEEEEEEEEEGGGGAAAAAEEEEEEEEELLLLLLLLVVVVVVVDDDDDDDDQQQQQQQQQVVVVVVVLLLLLLLLDDDDDDDDVVVVVVVVVVVVVVRRRRRRRRRRRRRRRRRRRRRREEEEEEEEEAAAAAEEEEEEEEEAAAAACCCCCCDDDDDDDDSSSSSSLLLLLLLLQQQQQQQQQGGGGFFFFFFFFFFFQQQQQQQQQIIIIIIIITTTTTTTHHHHHHHHHHSSSSSSLLLLLLLLGGGGGGGGGGGGTTTTTTTGGGGSSSSSSGGGGMMMMMMMMGGGGTTTTTTTLLLLLLLLLLLLLLLLIIIIIIIIAAAAAKKKKKKKKKVVVVVVVRRRRRRRRRRREEEEEEEEEEEEEEEEEEFFFFFFFFFFFPPPPPPPDDDDDDDDRRRRRRRRRRRMMMMMMMMMMMMMMMMAAAAATTTTTTTFFFFFFFFFFFSSSSSSVVVVVVVLLLLLLLLPPPPPPPSSSSSSAAAAAKKKKKKKKKVVVVVVVSSSSSSEEEEEEEEEVVVVVVVVVVVVVVVVVVVVVEEEEEEEEEPPPPPPPYYYYYYYYYYYYNNNNNNNNAAAAATTTTTTTLLLLLLLLSSSSSSIIIIIIIIHHHHHHHHHHQQQQQQQQQLLLLLLLLVVVVVVVEEEEEEEEENNNNNNNNSSSSSSDDDDDDDDEEEEEEEEETTTTTTTFFFFFFFFFFFCCCCCCIIIIIIIIDDDDDDDDNNNNNNNNEEEEEEEEEAAAAALLLLLLLLYYYYYYYYYYYYDDDDDDDDIIIIIIIICCCCCCRRRRRRRRRRRRRRRRRRRRRRTTTTTTTLLLLLLLLKKKKKKKKKQQQQQQQQQAAAAAHHHHHHHHHHPPPPPPPSSSSSSYYYYYYYYYYYYGGGGHHHHHHHHHHLLLLLLLLNNNNNNNNHHHHHHHHHHLLLLLLLLVVVVVVVSSSSSSRRRRRRRRRRRVVVVVVVMMMMMMMMSSSSSSGGGGLLLLLLLLTTTTTTTTTTTTTTGGGGFFFFFFFFFFFRRRRRRRRRRRFFFFFFFFFFFPPPPPPPGGGGQQQQQQQQQLLLLLLLLNNNNNNNNAAAAADDDDDDDDLLLLLLLLRRRRRRRRRRRKKKKKKKKKLLLLLLLLAAAAAVVVVVVVNNNNNNNNLLLLLLLLVVVVVVVPPPPPPPFFFFFFFFFFFPPPPPPPRRRRRRRRRRRLLLLLLLLHHHHHHHHHHFFFFFFFFFFFFFFFFFFFFFFTTTTTTTVVVVVVVGGGGFFFFFFFFFFFAAAAAPPPPPPPLLLLLLLLTTTTTTTSSSSSSSSSSSSAAAAASSSSSSFFFFFFFFFFFSSSSSSNNNNNNNNLLLLLLLLGGGGIIIIIIIIAAAAAEEEEEEEEELLLLLLLLTTTTTTTQQQQQQQQQQQQQQQQQQMMMMMMMMFFFFFFFFFFFDDDDDDDDPPPPPPPKKKKKKKKKNNNNNNNNVVVVVVVMMMMMMMMLLLLLLLLAAAAASSSSSSDDDDDDDDFFFFFFFFFFFRRRRRRRRRRRDDDDDDDDGGGGRRRRRRRRRRRFFFFFFFFFFFLLLLLLLLTTTTTTTCCCCCCSSSSSSTTTTTTTMMMMMMMMFFFFFFFFFFFRRRRRRRRRRRGGGGKKKKKKKKKVVVVVVVSSSSSSMMMMMMMMKKKKKKKKKQQQQQQQQQVVVVVVVEEEEEEEEEEEEEEEEEEQQQQQQQQQIIIIIIIIQQQQQQQQQAAAAAIIIIIIIIKKKKKKKKKNNNNNNNNKKKKKKKKKNNNNNNNNSSSSSSAAAAANNNNNNNNFFFFFFFFFFFVVVVVVVEEEEEEEEEWWWWWWWWWWWWWWIIIIIIIIPPPPPPPNNNNNNNNNNNNNNNNIIIIIIIIQQQQQQQQQTTTTTTTAAAAAHHHHHHHHHHCCCCCCSSSSSSVVVVVVVPPPPPPPPPPPPPPKKKKKKKKKGGGGLLLLLLLLDDDDDDDDVVVVVVVSSSSSSSSSSSSTTTTTTTFFFFFFFFFFFIIIIIIIIGGGGNNNNNNNNSSSSSSTTTTTTTAAAAAIIIIIIIIQQQQQQQQQNNNNNNNNSSSSSSFFFFFFFFFFFRRRRRRRRRRRRRRRRRRRRRRVVVVVVVGGGGDDDDDDDDQQQQQQQQQFFFFFFFFFFFSSSSSSLLLLLLLLMMMMMMMMFFFFFFFFFFFRRRRRRRRRRRRRRRRRRRRRRKKKKKKKKKAAAAAFFFFFFFFFFFLLLLLLLLHHHHHHHHHHWWWWWWWWWWWWWWYYYYYYYYYYYYTTTTTTTGGGGEEEEEEEEEGGGGMMMMMMMMDDDDDDDDEEEEEEEEEMMMMMMMMEEEEEEEEEFFFFFFFFFFFTTTTTTTEEEEEEEEEAAAAAEEEEEEEEESSSSSSNNNNNNNNMMMMMMMMNNNNNNNNDDDDDDDDLLLLLLLLVVVVVVVSSSSSSEEEEEEEEEYYYYYYYYYYYYQQQQQQQQQQQQQQQQQQYYYYYYYYYYYYQQQQQQQQQDDDDDDDDAAAAAGGGGMMMMMMMMDDDDDDDDDDDDDDDDEEEEEEEEEYYYYYYYYYYYYGGGGEEEEEEEEEEEEEEEEEEYYYYYYYYYYYYEEEEEEEEEDDDDDDDDEEEEEEEEEAAAAAPPPPPPPAAAAAEEEEEEEEEEEEEEEEEEEEEEEEEEEE

SEQ ID NO: 114 - protein, 3490 aa, Cyanophora paradoxa
MMMMMMMMRRRRRRRRRRREEEEEEEEEIIIIIIIIVVVVVVVHHHHHHHHHHVVVVVVVQQQQQQQQQGGGGGGGGQQQQQQQQQCCCCCCGGGGNNNNNNNNQQQQQQQQQIIIIIIIIGGGGAAAAAKKKKKKKKKFFFFFFFFFFFWWWWWWWWWWWWWWEEEEEEEEEVVVVVVVIIIIIIIISSSSSSDDDDDDDDEEEEEEEEEHHHHHHHHHHGGGGVVVVVVVDDDDDDDDPPPPPPPTTTTTTTGGGGTTTTTTTYYYYYYYYYYYYHHHHHHHHHHGGGGDDDDDDDDSSSSSSDDDDDDDDLLLLLLLLQQQQQQQQQLLLLLLLLEEEEEEEEERRRRRRRRRRRIIIIIIIINNNNNNNNVVVVVVVYYYYYYYYYYYYYYYYYYYYYYYYNNNNNNNNEEEEEEEEEAAAAATTTTTTTGGGGGGGGRRRRRRRRRRRYYYYYYYYYYYYVVVVVVVPPPPPPPRRRRRRRRRRRAAAAAVVVVVVVLLLLLLLLMMMMMMMMDDDDDDDDLLLLLLLLEEEEEEEEEPPPPPPPGGGGTTTTTTTMMMMMMMMDDDDDDDDSSSSSSVVVVVVVRRRRRRRRRRRAAAAAGGGGPPPPPPPYYYYYYYYYYYYGGGGQQQQQQQQQLLLLLLLLFFFFFFFFFFFRRRRRRRRRRRPPPPPPPDDDDDDDDNNNNNNNNFFFFFFFFFFFIIIIIIIIFFFFFFFFFFFGGGGQQQQQQQQQSSSSSSGGGGAAAAAGGGGNNNNNNNNNNNNNNNNWWWWWWWWWWWWWWAAAAAKKKKKKKKKGGGGHHHHHHHHHHYYYYYYYYYYYYTTTTTTTEEEEEEEEEGGGGAAAAAEEEEEEEEELLLLLLLLIIIIIIIIDDDDDDDDSSSSSSVVVVVVVLLLLLLLLDDDDDDDDVVVVVVVVVVVVVVRRRRRRRRRRRKKKKKKKKKEEEEEEEEEAAAAAEEEEEEEEEGGGGCCCCCCDDDDDDDDCCCCCCLLLLLLLLQQQQQQQQQGGGGFFFFFFFFFFFQQQQQQQQQIIIIIIIITTTTTTTHHHHHHHHHHSSSSSSMMMMMMMMGGGGGGGGGGGGTTTTTTTGGGGSSSSSSGGGGMMMMMMMMGGGGTTTTTTTLLLLLLLLLLLLLLLLIIIIIIIIAAAAAKKKKKKKKKVVVVVVVRRRRRRRRRRREEEEEEEEEEEEEEEEEEYYYYYYYYYYYYPPPPPPPDDDDDDDDRRRRRRRRRRRMMMMMMMMMMMMMMMMCCCCCCTTTTTTTYYYYYYYYYYYYSSSSSSVVVVVVVFFFFFFFFFFFPPPPPPPSSSSSSPPPPPPPKKKKKKKKKVVVVVVVSSSSSSDDDDDDDDTTTTTTTVVVVVVVVVVVVVVEEEEEEEEEPPPPPPPYYYYYYYYYYYYNNNNNNNNAAAAATTTTTTTLLLLLLLLSSSSSSVVVVVVVHHHHHHHHHHQQQQQQQQQLLLLLLLLVVVVVVVEEEEEEEEENNNNNNNNAAAAADDDDDDDDEEEEEEEEEVVVVVVVMMMMMMMMVVVVVVVIIIIIIIIDDDDDDDDNNNNNNNNEEEEEEEEEAAAAALLLLLLLLYYYYYYYYYYYYDDDDDDDDIIIIIIIICCCCCCFFFFFFFFFFFRRRRRRRRRRRTTTTTTTLLLLLLLLKKKKKKKKKLLLLLLLLTTTTTTTTTTTTTTPPPPPPPTTTTTTTYYYYYYYYYYYYGGGGDDDDDDDDLLLLLLLLNNNNNNNNHHHHHHHHHHLLLLLLLLVVVVVVVSSSSSSAAAAACCCCCCIIIIIIIISSSSSSGGGGVVVVVVVTTTTTTTCCCCCCCCCCCCLLLLLLLLRRRRRRRRRRRFFFFFFFFFFFPPPPPPPGGGGQQQQQQQQQLLLLLLLLNNNNNNNNSSSSSSDDDDDDDDLLLLLLLLRRRRRRRRRRRKKKKKKKKKLLLLLLLLAAAAAVVVVVVVNNNNNNNNLLLLLLLLIIIIIIIIPPPPPPPFFFFFFFFFFFPPPPPPPRRRRRRRRRRRLLLLLLLLHHHHHHHHHHFFFFFFFFFFFFFFFFFFFFFFMMMMMMMMIIIIIIIIGGGGFFFFFFFFFFFVVVVVVVPPPPPPPLLLLLLLLTTTTTTTSSSSSSRRRRRRRRRRRGGGGSSSSSSQQQQQQQQQQQQQQQQQQYYYYYYYYYYYYRRRRRRRRRRRAAAAALLLLLLLLTTTTTTTVVVVVVVPPPPPPPEEEEEEEEELLLLLLLLTTTTTTTQQQQQQQQQQQQQQQQQQMMMMMMMMFFFFFFFFFFFDDDDDDDDAAAAAKKKKKKKKKNNNNNNNNMMMMMMMMMMMMMMMMCCCCCCAAAAAAAAAADDDDDDDDPPPPPPPRRRRRRRRRRRHHHHHHHHHHGGGGRRRRRRRRRRRYYYYYYYYYYYYLLLLLLLLTTTTTTTAAAAASSSSSSAAAAALLLLLLLLFFFFFFFFFFFRRRRRRRRRRRGGGGRRRRRRRRRRRMMMMMMMMSSSSSSTTTTTTTKKKKKKKKKEEEEEEEEEVVVVVVVDDDDDDDDEEEEEEEEEQQQQQQQQQMMMMMMMMLLLLLLLLNNNNNNNNVVVVVVVQQQQQQQQQNNNNNNNNKKKKKKKKKNNNNNNNNSSSSSSSSSSSSYYYYYYYYYYYYFFFFFFFFFFFVVVVVVVEEEEEEEEEWWWWWWWWWWWWWWIIIIIIIIPPPPPPPNNNNNNNNNNNNNNNNIIIIIIIIKKKKKKKKKAAAAASSSSSSVVVVVVVCCCCCCDDDDDDDDIIIIIIIIPPPPPPPPPPPPPPKKKKKKKKKGGGGLLLLLLLLKKKKKKKKKMMMMMMMMSSSSSSAAAAATTTTTTTFFFFFFFFFFFIIIIIIIIGGGGNNNNNNNNSSSSSSTTTTTTTAAAAAIIIIIIIIQQQQQQQQQEEEEEEEEEMMMMMMMMFFFFFFFFFFFKKKKKKKKKRRRRRRRRRRRVVVVVVVSSSSSSEEEEEEEEEQQQQQQQQQFFFFFFFFFFFTTTTTTTAAAAAMMMMMMMMFFFFFFFFFFFRRRRRRRRRRRRRRRRRRRRRRKKKKKKKKKAAAAAFFFFFFFFFFFLLLLLLLLHHHHHHHHHHWWWWWWWWWWWWWWYYYYYYYYYYYYTTTTTTTGGGGEEEEEEEEEGGGGMMMMMMMMDDDDDDDDEEEEEEEEEMMMMMMMMEEEEEEEEEFFFFFFFFFFFTTTTTTTEEEEEEEEEAAAAAEEEEEEEEESSSSSSNNNNNNNNMMMMMMMMNNNNNNNNDDDDDDDDLLLLLLLLVVVVVVVSSSSSSEEEEEEEEEYYYYYYYYYYYYQQQQQQQQQQQQQQQQQQYYYYYYYYYYYYQQQQQQQQQDDDDDDDDAAAAATTTTTTTAAAAAEEEEEEEEEEEEEEEEEEEEEEEEEEEGGGGEEEEEEEEEGGGGDDDDDDDDEEEEEEEEEEEEEEEEEEEEEEEEEEEAAAAAEEEEEEEEEGGGGEEEEEEEEEAAAAAAAAAAAAAAAA

SEQ ID NO: 115 - protein, 2504 aa, Daucus carota
FFFFFFFFFFFQQQQQQQQQVVVVVVVCCCCCCHHHHHHHHHHSSSSSSLLLLLLLLGGGGGGGGGGGGTTTTTTTGGGGSSSSSSGGGGMMMMMMMMGGGGTTTTTTTLLLLLLLLLLLLLLLLIIIIIIIISSSSSSKKKKKKKKKIIIIIIIIRRRRRRRRRRREEEEEEEEEEEEEEEEEEYYYYYYYYYYYYPPPPPPPDDDDDDDDRRRRRRRRRRRMMMMMMMMMMMMMMMMLLLLLLLLTTTTTTTFFFFFFFFFFFSSSSSSVVVVVVVFFFFFFFFFFFPPPPPPPSSSSSSPPPPPPPKKKKKKKKKVVVVVVVSSSSSSDDDDDDDDTTTTTTTVVVVVVVVVVVVVVEEEEEEEEEPPPPPPPYYYYYYYYYYYYNNNNNNNNAAAAATTTTTTTLLLLLLLLSSSSSSVVVVVVVHHHHHHHHHHQQQQQQQQQLLLLLLLLVVVVVVVEEEEEEEEENNNNNNNNAAAAADDDDDDDDVVVVVVVCCCCCCMMMMMMMMVVVVVVVLLLLLLLLDDDDDDDDNNNNNNNNEEEEEEEEEAAAAALLLLLLLLYYYYYYYYYYYYDDDDDDDDIIIIIIIICCCCCCFFFFFFFFFFFRRRRRRRRRRRTTTTTTTLLLLLLLLKKKKKKKKKLLLLLLLLTTTTTTTTTTTTTTPPPPPPPSSSSSSFFFFFFFFFFFGGGGDDDDDDDDLLLLLLLLNNNNNNNNHHHHHHHHHHLLLLLLLLIIIIIIIISSSSSSAAAAATTTTTTTMMMMMMMMSSSSSSGGGGVVVVVVVTTTTTTTCCCCCCSSSSSSLLLLLLLLRRRRRRRRRRRFFFFFFFFFFFPPPPPPPGGGGQQQQQQQQQLLLLLLLLNNNNNNNNSSSSSSDDDDDDDDLLLLLLLLRRRRRRRRRRRKKKKKKKKKLLLLLLLLAAAAAVVVVVVVIIIIIIIILLLLLLLLIIIIIIIIPPPPPPPFFFFFFFFFFFPPPPPPPRRRRRRRRRRRLLLLLLLLHHHHHHHHHHFFFFFFFFFFFFFFFFFFFFFFMMMMMMMMVVVVVVVGGGGFFFFFFFFFFFAAAAAPPPPPPPLLLLLLLLTTTTTTTSSSSSSRRRRRRRRRRRGGGGSSSSSSQQQQQQQQQQQQQQQQQQYYYYYYYYYYYYRRRRRRRRRRRSSSSSSLLLLLLLLSSSSSSVVVVVVVPPPPPPPEEEEEEEEELLLLLLLLTTTTTTTQQQQQQQQQQQQQQQQQQMMMMMMMMWWWWWWWWWWWWWWDDDDDDDDSSSSSSKKKKKKKKKNNNNNNNNMMMMMMMMMMMMMMMMCCCCCCAAAAAAAAAADDDDDDDDPPPPPPPRRRRRRRRRRRHHHHHHHHHHGGGGRRRRRRRRRRRYYYYYYYYYYYYLLLLLLLLTTTTTTTAAAAASSSSSSAAAAAMMMMMMMMFFFFFFFFFFFRRRRRRRRRRREEEEEEEEEKKKKKKKKKMMMMMMMMSSSSSSTTTTTTTKKKKKKKKKDDDDDDDDLLLLLLLLDDDDDDDDEEEEEEEEEQQQQQQQQQMMMMMMMMIIIIIIIINNNNNNNNVVVVVVVQQQQQQQQQNNNNNNNNKKKKKKKKKNNNNNNNNSSSSSSSSSSSSYYYYYYYYYYYYFFFFFFFFFFFVVVVVVVEEEEEEEEEWWWWWWWWWWWWWWIIIIIIIIPPPPPPPNNNNNNNNNNNNNNNNVVVVVVVKKKKKKKKKSSSSSSTTTTTTTVVVVVVVCCCCCCDDDDDDDDIIIIIIIIPPPPPPPPPPPPPPTTTTTTTGGGGLLLLLLLLKKKKKKKKKMMMMMMMMAAAAASSSSSSTTTTTTTFFFFFFFFFFFIIIIIIIIGGGGNNNNNNNNSSSSSSTTTTTTTSSSSSSIIIIIIIIQQQQQQQQQEEEEEEEEEMMMMMMMMFFFFFFFFFFFRRRRRRRRRRRRRRRRRRRRRRVVVVVVVSSSSSSEEEEEEEEEQQQQQQQQQFFFFFFFFFFFTTTTTTTAAAAAMMMMMMMMFFFFFFFFFFFRRRRRRRRRRRRRRRRRRRRRRKKKKKKKKKAAAAAFFFFFFFFFFFLLLLLLLLHHHHHHHHHHWWWWWWWWWWWWWWYYYYYYYYYYYYTTTTTTTGGGGEEEEEEEEEGGGGMMMMMMMMDDDDDDDDEEEEEEEEEMMMMMMMMEEEEEEEEEFFFFFFFFFFFTTTTTTTEEEEEEEEEAAAAAEEEEEEEEESSSSSSNNNNNNNNMMMMMMMMNNNNNNNNDDDDDDDDLLLLLLLLVVVVVVVSSSSSSEEEEEEEEEYYYYYYYYYYYYQQQQQQQQQQQQQQQQQQYYYYYYYYYYYYQQQQQQQQQDDDDDDDDAAAAATTTTTTTAAAAADDDDDDDDEEEEEEEEEEEEEEEEEEEEEEEEEEEYYYYYYYYYYYYYYYYYYYYYYYYEEEEEEEEEDDDDDDDDEEEEEEEEEEEEEEEEEEEEEEEEEEEEEEEEEEEEEEEEEEEEEAAAAAQQQQQQQQQGGGGMMMMMMMMM

SEQ ID NO: 116 - protein, 3499 aa, Eleusine indica
MMMMMMMMRRRRRRRRRRREEEEEEEEEIIIIIIIILLLLLLLLHHHHHHHHHHIIIIIIIIQQQQQQQQQGGGGGGGGQQQQQQQQQCCCCCCGGGGNNNNNNNNQQQQQQQQQIIIIIIIIGGGGAAAAAKKKKKKKKKFFFFFFFFFFFWWWWWWWWWWWWWWEEEEEEEEEVVVVVVVIIIIIIIICCCCCCDDDDDDDDEEEEEEEEEHHHHHHHHHHGGGGIIIIIIIIDDDDDDDDHHHHHHHHHHTTTTTTTGGGGKKKKKKKKKYYYYYYYYYYYYAAAAAGGGGDDDDDDDDSSSSSSDDDDDDDDLLLLLLLLQQQQQQQQQLLLLLLLLEEEEEEEEERRRRRRRRRRRIIIIIIIINNNNNNNNVVVVVVVYYYYYYYYYYYYYYYYYYYYYYYYNNNNNNNNEEEEEEEEEAAAAASSSSSSGGGGGGGGRRRRRRRRRRRFFFFFFFFFFFVVVVVVVPPPPPPPRRRRRRRRRRRAAAAAVVVVVVVLLLLLLLLMMMMMMMMDDDDDDDDLLLLLLLLEEEEEEEEEPPPPPPPGGGGTTTTTTTMMMMMMMMDDDDDDDDSSSSSSVVVVVVVRRRRRRRRRRRSSSSSSGGGGPPPPPPPFFFFFFFFFFFGGGGQQQQQQQQQIIIIIIIIFFFFFFFFFFFRRRRRRRRRRRPPPPPPPDDDDDDDDNNNNNNNNFFFFFFFFFFFVVVVVVVFFFFFFFFFFFGGGGQQQQQQQQQSSSSSSGGGGAAAAAGGGGNNNNNNNNNNNNNNNNWWWWWWWWWWWWWWAAAAAKKKKKKKKKGGGGHHHHHHHHHHYYYYYYYYYYYYTTTTTTTEEEEEEEEEGGGGAAAAAEEEEEEEEELLLLLLLLIIIIIIIIDDDDDDDDSSSSSSVVVVVVVLLLLLLLLDDDDDDDDVVVVVVVVVVVVVVRRRRRRRRRRRKKKKKKKKKEEEEEEEEEAAAAAEEEEEEEEENNNNNNNNCCCCCCDDDDDDDDCCCCCCLLLLLLLLQQQQQQQQQGGGGFFFFFFFFFFFQQQQQQQQQVVVVVVVCCCCCCHHHHHHHHHHSSSSSSLLLLLLLLGGGGGGGGGGGGTTTTTTTGGGGSSSSSSGGGGMMMMMMMMGGGGTTTTTTTLLLLLLLLLLLLLLLLIIIIIIIISSSSSSKKKKKKKKKIIIIIIIIRRRRRRRRRRREEEEEEEEEEEEEEEEEEYYYYYYYYYYYYPPPPPPPDDDDDDDDRRRRRRRRRRRMMMMMMMMMMMMMMMMLLLLLLLLTTTTTTTFFFFFFFFFFFSSSSSSVVVVVVVFFFFFFFFFFFPPPPPPPSSSSSSPPPPPPPKKKKKKKKKVVVVVVVSSSSSSDDDDDDDDTTTTTTTVVVVVVVVVVVVVVEEEEEEEEEPPPPPPPYYYYYYYYYYYYNNNNNNNNAAAAATTTTTTTLLLLLLLLSSSSSSVVVVVVVHHHHHHHHHHQQQQQQQQQLLLLLLLLVVVVVVVEEEEEEEEENNNNNNNNAAAAADDDDDDDDEEEEEEEEECCCCCCMMMMMMMMVVVVVVVLLLLLLLLDDDDDDDDNNNNNNNNEEEEEEEEEAAAAALLLLLLLLYYYYYYYYYYYYDDDDDDDDIIIIIIIICCCCCCFFFFFFFFFFFRRRRRRRRRRRTTTTTTTLLLLLLLLKKKKKKKKKLLLLLLLLAAAAATTTTTTTPPPPPPPTTTTTTTFFFFFFFFFFFGGGGDDDDDDDDLLLLLLLLNNNNNNNNHHHHHHHHHHLLLLLLLLIIIIIIIISSSSSSAAAAATTTTTTTMMMMMMMMSSSSSSGGGGVVVVVVVTTTTTTTCCCCCCCCCCCCLLLLLLLLRRRRRRRRRRRFFFFFFFFFFFPPPPPPPGGGGQQQQQQQQQLLLLLLLLNNNNNNNNSSSSSSDDDDDDDDLLLLLLLLRRRRRRRRRRRKKKKKKKKKLLLLLLLLAAAAAVVVVVVVNNNNNNNNLLLLLLLLIIIIIIIIPPPPPPPFFFFFFFFFFFPPPPPPPRRRRRRRRRRRLLLLLLLLHHHHHHHHHHFFFFFFFFFFFFFFFFFFFFFFMMMMMMMMVVVVVVVGGGGFFFFFFFFFFFAAAAAPPPPPPPLLLLLLLLTTTTTTTSSSSSSRRRRRRRRRRRGGGGSSSSSSQQQQQQQQQQQQQQQQQQYYYYYYYYYYYYRRRRRRRRRRRAAAAALLLLLLLLTTTTTTTVVVVVVVPPPPPPPEEEEEEEEELLLLLLLLTTTTTTTQQQQQQQQQQQQQQQQQQMMMMMMMMWWWWWWWWWWWWWWDDDDDDDDSSSSSSKKKKKKKKKNNNNNNNNMMMMMMMMMMMMMMMMCCCCCCAAAAAAAAAADDDDDDDDPPPPPPPRRRRRRRRRRRHHHHHHHHHHGGGGRRRRRRRRRRRYYYYYYYYYYYYLLLLLLLLTTTTTTTAAAAASSSSSSAAAAAMMMMMMMMFFFFFFFFFFFRRRRRRRRRRRGGGGKKKKKKKKKMMMMMMMMSSSSSSTTTTTTTKKKKKKKKKEEEEEEEEEVVVVVVVDDDDDDDDEEEEEEEEEQQQQQQQQQMMMMMMMMLLLLLLLLNNNNNNNNVVVVVVVQQQQQQQQQNNNNNNNNKKKKKKKKKNNNNNNNNSSSSSSSSSSSSYYYYYYYYYYYYFFFFFFFFFFFVVVVVVVEEEEEEEEEWWWWWWWWWWWWWWIIIIIIIIPPPPPPPNNNNNNNNNNNNNNNNVVVVVVVKKKKKKKKKSSSSSSSSSSSSVVVVVVVCCCCCCDDDDDDDDIIIIIIIIPPPPPPPPPPPPPPNNNNNNNNGGGGLLLLLLLLKKKKKKKKKMMMMMMMMAAAAASSSSSSTTTTTTTFFFFFFFFFFFIIIIIIIIGGGGNNNNNNNNSSSSSSTTTTTTTSSSSSSIIIIIIIIQQQQQQQQQEEEEEEEEEMMMMMMMMFFFFFFFFFFFRRRRRRRRRRRRRRRRRRRRRRVVVVVVVSSSSSSEEEEEEEEEQQQQQQQQQFFFFFFFFFFFTTTTTTTAAAAAMMMMMMMMFFFFFFFFFFFRRRRRRRRRRRRRRRRRRRRRRKKKKKKKKKAAAAAFFFFFFFFFFFLLLLLLLLHHHHHHHHHHWWWWWWWWWWWWWWYYYYYYYYYYYYTTTTTTTGGGGEEEEEEEEEGGGGMMMMMMMMDDDDDDDDEEEEEEEEEMMMMMMMMEEEEEEEEEFFFFFFFFFFFTTTTTTTEEEEEEEEEAAAAAEEEEEEEEESSSSSSNNNNNNNNMMMMMMMMNNNNNNNNDDDDDDDDLLLLLLLLVVVVVVVAAAAAEEEEEEEEEYYYYYYYYYYYYQQQQQQQQQQQQQQQQQQYYYYYYYYYYYYQQQQQQQQQDDDDDDDDAAAAATTTTTTTAAAAAEEEEEEEEEDDDDDDDDEEEEEEEEEEEEEEEEEEEEEEEEEEEYYYYYYYYYYYYEEEEEEEEEDDDDDDDDEEEEEEEEEEEEEEEEEEEEEEEEEEEEEEEEEEEEMMMMMMMMAAAAAAAAAAA

SEQ ID NO: 117 - protein, 3494 aa, Emericella nidulans
MMMMMMMMRRRRRRRRRRREEEEEEEEEIIIIIIIIVVVVVVVHHHHHHHHHHLLLLLLLLQQQQQQQQQTTTTTTTGGGGQQQQQQQQQCCCCCCGGGGNNNNNNNNQQQQQQQQQIIIIIIIIGGGGAAAAAAAAAAFFFFFFFFFFFWWWWWWWWWWWWWWQQQQQQQQQTTTTTTTIIIIIIIISSSSSSGGGGEEEEEEEEEHHHHHHHHHHGGGGLLLLLLLLDDDDDDDDGGGGSSSSSSGGGGVVVVVVVYYYYYYYYYYYYNNNNNNNNGGGGTTTTTTTSSSSSSDDDDDDDDLLLLLLLLQQQQQQQQQLLLLLLLLEEEEEEEEERRRRRRRRRRRMMMMMMMMNNNNNNNNVVVVVVVYYYYYYYYYYYYFFFFFFFFFFFNNNNNNNNEEEEEEEEEAAAAASSSSSSGGGGNNNNNNNNKKKKKKKKKYYYYYYYYYYYYVVVVVVVPPPPPPPRRRRRRRRRRRAAAAAVVVVVVVLLLLLLLLVVVVVVVDDDDDDDDLLLLLLLLEEEEEEEEEPPPPPPPGGGGTTTTTTTMMMMMMMMDDDDDDDDAAAAAVVVVVVVRRRRRRRRRRRAAAAAGGGGPPPPPPPFFFFFFFFFFFGGGGEEEEEEEEELLLLLLLLFFFFFFFFFFFRRRRRRRRRRRPPPPPPPDDDDDDDDNNNNNNNNFFFFFFFFFFFVVVVVVVFFFFFFFFFFFGGGGQQQQQQQQQSSSSSSGGGGAAAAAGGGGNNNNNNNNNNNNNNNNWWWWWWWWWWWWWWAAAAAKKKKKKKKKGGGGHHHHHHHHHHYYYYYYYYYYYYTTTTTTTEEEEEEEEEGGGGAAAAAEEEEEEEEELLLLLLLLVVVVVVVDDDDDDDDNNNNNNNNVVVVVVVVVVVVVVDDDDDDDDVVVVVVVVVVVVVVRRRRRRRRRRRRRRRRRRRRRREEEEEEEEEAAAAAEEEEEEEEEGGGGCCCCCCDDDDDDDDCCCCCCLLLLLLLLQQQQQQQQQGGGGFFFFFFFFFFFQQQQQQQQQIIIIIIIITTTTTTTHHHHHHHHHHSSSSSSLLLLLLLLGGGGGGGGGGGGTTTTTTTGGGGAAAAAGGGGMMMMMMMMGGGGTTTTTTTLLLLLLLLLLLLLLLLIIIIIIIISSSSSSKKKKKKKKKIIIIIIIIRRRRRRRRRRREEEEEEEEEEEEEEEEEEFFFFFFFFFFFPPPPPPPDDDDDDDDRRRRRRRRRRRMMMMMMMMMMMMMMMMAAAAATTTTTTTFFFFFFFFFFFSSSSSSVVVVVVVVVVVVVVPPPPPPPSSSSSSPPPPPPPKKKKKKKKKVVVVVVVSSSSSSDDDDDDDDTTTTTTTVVVVVVVVVVVVVVEEEEEEEEEPPPPPPPYYYYYYYYYYYYNNNNNNNNAAAAATTTTTTTLLLLLLLLSSSSSSVVVVVVVHHHHHHHHHHQQQQQQQQQLLLLLLLLVVVVVVVEEEEEEEEEHHHHHHHHHHSSSSSSDDDDDDDDEEEEEEEEETTTTTTTFFFFFFFFFFFCCCCCCIIIIIIIIDDDDDDDDNNNNNNNNEEEEEEEEEAAAAALLLLLLLLYYYYYYYYYYYYDDDDDDDDIIIIIIIICCCCCCMMMMMMMMRRRRRRRRRRRTTTTTTTLLLLLLLLKKKKKKKKKLLLLLLLLSSSSSSNNNNNNNNPPPPPPPSSSSSSYYYYYYYYYYYYGGGGDDDDDDDDLLLLLLLLNNNNNNNNHHHHHHHHHHLLLLLLLLVVVVVVVSSSSSSAAAAAVVVVVVVMMMMMMMMSSSSSSGGGGVVVVVVVTTTTTTTTTTTTTTCCCCCCLLLLLLLLRRRRRRRRRRRFFFFFFFFFFFPPPPPPPGGGGQQQQQQQQQLLLLLLLLNNNNNNNNSSSSSSDDDDDDDDLLLLLLLLRRRRRRRRRRRKKKKKKKKKLLLLLLLLAAAAAVVVVVVVNNNNNNNNMMMMMMMMVVVVVVVPPPPPPPFFFFFFFFFFFPPPPPPPRRRRRRRRRRRLLLLLLLLHHHHHHHHHHFFFFFFFFFFFFFFFFFFFFFFMMMMMMMMVVVVVVVGGGGFFFFFFFFFFFAAAAAPPPPPPPLLLLLLLLTTTTTTTSSSSSSRRRRRRRRRRRGGGGAAAAAYYYYYYYYYYYYSSSSSSFFFFFFFFFFFRRRRRRRRRRRAAAAAVVVVVVVSSSSSSVVVVVVVPPPPPPPEEEEEEEEELLLLLLLLTTTTTTTQQQQQQQQQQQQQQQQQQMMMMMMMMFFFFFFFFFFFDDDDDDDDPPPPPPPKKKKKKKKKNNNNNNNNMMMMMMMMMMMMMMMMAAAAAAAAAASSSSSSDDDDDDDDFFFFFFFFFFFRRRRRRRRRRRNNNNNNNNGGGGRRRRRRRRRRRYYYYYYYYYYYYLLLLLLLLTTTTTTTCCCCCCSSSSSSAAAAAIIIIIIIIFFFFFFFFFFFRRRRRRRRRRRGGGGKKKKKKKKKVVVVVVVSSSSSSMMMMMMMMKKKKKKKKKEEEEEEEEEVVVVVVVEEEEEEEEEDDDDDDDDQQQQQQQQQMMMMMMMMRRRRRRRRRRRNNNNNNNNIIIIIIIIQQQQQQQQQSSSSSSKKKKKKKKKNNNNNNNNQQQQQQQQQSSSSSSYYYYYYYYYYYYFFFFFFFFFFFVVVVVVVEEEEEEEEEWWWWWWWWWWWWWWIIIIIIIIPPPPPPPNNNNNNNNNNNNNNNNIIIIIIIIQQQQQQQQQTTTTTTTAAAAALLLLLLLLCCCCCCSSSSSSIIIIIIIIPPPPPPPPPPPPPPRRRRRRRRRRRGGGGLLLLLLLLKKKKKKKKKMMMMMMMMSSSSSSSSSSSSTTTTTTTFFFFFFFFFFFIIIIIIIIGGGGNNNNNNNNSSSSSSTTTTTTTSSSSSSIIIIIIIIQQQQQQQQQEEEEEEEEELLLLLLLLFFFFFFFFFFFKKKKKKKKKRRRRRRRRRRRVVVVVVVGGGGDDDDDDDDQQQQQQQQQFFFFFFFFFFFTTTTTTTAAAAAMMMMMMMMFFFFFFFFFFFRRRRRRRRRRRRRRRRRRRRRRKKKKKKKKKAAAAAFFFFFFFFFFFLLLLLLLLHHHHHHHHHHWWWWWWWWWWWWWWYYYYYYYYYYYYTTTTTTTGGGGEEEEEEEEEGGGGMMMMMMMMDDDDDDDDEEEEEEEEEMMMMMMMMEEEEEEEEEFFFFFFFFFFFTTTTTTTEEEEEEEEEAAAAAEEEEEEEEESSSSSSNNNNNNNNMMMMMMMMNNNNNNNNDDDDDDDDLLLLLLLLVVVVVVVSSSSSSEEEEEEEEEYYYYYYYYYYYYQQQQQQQQQQQQQQQQQQYYYYYYYYYYYYQQQQQQQQQDDDDDDDDAAAAASSSSSSIIIIIIIISSSSSSEEEEEEEEEGGGGEEEEEEEEEEEEEEEEEEEEEEEEEEEYYYYYYYYYYYYAAAAAEEEEEEEEEEEEEEEEEEEEEEEEEEEIIIIIIIIMMMMMMMMEEEEEEEEEGGGGEEEEEEEEEEEEEEEEEEE

SEQ ID NO: 118 - protein, 3490 aa, Gadus morhua
MMMMMMMMRRRRRRRRRRREEEEEEEEEIIIIIIIIVVVVVVVHHHHHHHHHHLLLLLLLLQQQQQQQQQAAAAAGGGGQQQQQQQQQCCCCCCGGGGNNNNNNNNQQQQQQQQQIIIIIIIIGGGGAAAAAKKKKKKKKKFFFFFFFFFFFWWWWWWWWWWWWWWEEEEEEEEEVVVVVVVIIIIIIIISSSSSSDDDDDDDDEEEEEEEEEHHHHHHHHHHGGGGIIIIIIIIDDDDDDDDPPPPPPPTTTTTTTGGGGTTTTTTTYYYYYYYYYYYYHHHHHHHHHHGGGGDDDDDDDDSSSSSSDDDDDDDDLLLLLLLLQQQQQQQQQLLLLLLLLDDDDDDDDRRRRRRRRRRRIIIIIIIINNNNNNNNVVVVVVVYYYYYYYYYYYYYYYYYYYYYYYYNNNNNNNNEEEEEEEEEAAAAASSSSSSGGGGGGGGKKKKKKKKKYYYYYYYYYYYYVVVVVVVPPPPPPPRRRRRRRRRRRAAAAAVVVVVVVLLLLLLLLVVVVVVVDDDDDDDDLLLLLLLLEEEEEEEEEPPPPPPPGGGGTTTTTTTMMMMMMMMDDDDDDDDSSSSSSVVVVVVVRRRRRRRRRRRSSSSSSGGGGAAAAAFFFFFFFFFFFGGGGQQQQQQQQQVVVVVVVFFFFFFFFFFFRRRRRRRRRRRPPPPPPPDDDDDDDDNNNNNNNNFFFFFFFFFFFVVVVVVVFFFFFFFFFFFGGGGQQQQQQQQQSSSSSSGGGGAAAAAGGGGNNNNNNNNNNNNNNNNWWWWWWWWWWWWWWAAAAAKKKKKKKKKGGGGHHHHHHHHHHYYYYYYYYYYYYTTTTTTTEEEEEEEEEGGGGAAAAAEEEEEEEEELLLLLLLLVVVVVVVDDDDDDDDSSSSSSVVVVVVVLLLLLLLLDDDDDDDDVVVVVVVVVVVVVVRRRRRRRRRRRKKKKKKKKKEEEEEEEEEAAAAAEEEEEEEEESSSSSSCCCCCCDDDDDDDDCCCCCCLLLLLLLLQQQQQQQQQGGGGFFFFFFFFFFFQQQQQQQQQLLLLLLLLTTTTTTTHHHHHHHHHHSSSSSSLLLLLLLLGGGGGGGGGGGGTTTTTTTGGGGSSSSSSGGGGMMMMMMMMGGGGTTTTTTTLLLLLLLLLLLLLLLLIIIIIIIISSSSSSKKKKKKKKKIIIIIIIIRRRRRRRRRRREEEEEEEEEEEEEEEEEEYYYYYYYYYYYYPPPPPPPDDDDDDDDRRRRRRRRRRRIIIIIIIIMMMMMMMMNNNNNNNNTTTTTTTFFFFFFFFFFFSSSSSSVVVVVVVVVVVVVVPPPPPPPSSSSSSPPPPPPPKKKKKKKKKVVVVVVVSSSSSSDDDDDDDDTTTTTTTVVVVVVVVVVVVVVEEEEEEEEEPPPPPPPYYYYYYYYYYYYNNNNNNNNAAAAATTTTTTTLLLLLLLLSSSSSSVVVVVVVHHHHHHHHHHQQQQQQQQQLLLLLLLLVVVVVVVEEEEEEEEENNNNNNNNTTTTTTTDDDDDDDDEEEEEEEEETTTTTTTYYYYYYYYYYYYCCCCCCIIIIIIIIDDDDDDDDNNNNNNNNEEEEEEEEEAAAAALLLLLLLLYYYYYYYYYYYYDDDDDDDDIIIIIIIICCCCCCFFFFFFFFFFFRRRRRRRRRRRTTTTTTTLLLLLLLLKKKKKKKKKLLLLLLLLTTTTTTTTTTTTTTPPPPPPPSSSSSSYYYYYYYYYYYYGGGGDDDDDDDDLLLLLLLLNNNNNNNNHHHHHHHHHHLLLLLLLLVVVVVVVSSSSSSAAAAATTTTTTTMMMMMMMMSSSSSSGGGGVVVVVVVTTTTTTTTTTTTTTCCCCCCLLLLLLLLRRRRRRRRRRRFFFFFFFFFFFPPPPPPPGGGGQQQQQQQQQLLLLLLLLNNNNNNNNAAAAADDDDDDDDLLLLLLLLRRRRRRRRRRRKKKKKKKKKLLLLLLLLAAAAAVVVVVVVNNNNNNNNMMMMMMMMVVVVVVVPPPPPPPFFFFFFFFFFFPPPPPPPRRRRRRRRRRRLLLLLLLLHHHHHHHHHHFFFFFFFFFFFFFFFFFFFFFFMMMMMMMMPPPPPPPGGGGFFFFFFFFFFFAAAAAPPPPPPPLLLLLLLLTTTTTTTSSSSSSRRRRRRRRRRRGGGGSSSSSSQQQQQQQQQQQQQQQQQQYYYYYYYYYYYYRRRRRRRRRRRSSSSSSLLLLLLLLTTTTTTTVVVVVVVPPPPPPPEEEEEEEEELLLLLLLLTTTTTTTQQQQQQQQQQQQQQQQQQMMMMMMMMFFFFFFFFFFFDDDDDDDDGGGGKKKKKKKKKNNNNNNNNMMMMMMMMMMMMMMMMAAAAAAAAAACCCCCCDDDDDDDDPPPPPPPRRRRRRRRRRRHHHHHHHHHHGGGGRRRRRRRRRRRYYYYYYYYYYYYLLLLLLLLTTTTTTTVVVVVVVAAAAAAAAAAIIIIIIIIFFFFFFFFFFFRRRRRRRRRRRGGGGRRRRRRRRRRRMMMMMMMMSSSSSSMMMMMMMMKKKKKKKKKEEEEEEEEEVVVVVVVDDDDDDDDEEEEEEEEEQQQQQQQQQMMMMMMMMLLLLLLLLNNNNNNNNVVVVVVVQQQQQQQQQNNNNNNNNKKKKKKKKKNNNNNNNNSSSSSSSSSSSSYYYYYYYYYYYYFFFFFFFFFFFVVVVVVVEEEEEEEEEWWWWWWWWWWWWWWIIIIIIIIPPPPPPPNNNNNNNNNNNNNNNNVVVVVVVKKKKKKKKKTTTTTTTAAAAAVVVVVVVCCCCCCDDDDDDDDIIIIIIIIPPPPPPPPPPPPPPRRRRRRRRRRRGGGGLLLLLLLLKKKKKKKKKMMMMMMMMAAAAAAAAAATTTTTTTFFFFFFFFFFFIIIIIIIIGGGGNNNNNNNNSSSSSSTTTTTTTAAAAAIIIIIIIIQQQQQQQQQEEEEEEEEELLLLLLLLFFFFFFFFFFFKKKKKKKKKRRRRRRRRRRRIIIIIIIISSSSSSEEEEEEEEEQQQQQQQQQFFFFFFFFFFFTTTTTTTAAAAAMMMMMMMMFFFFFFFFFFFRRRRRRRRRRRRRRRRRRRRRRKKKKKKKKKAAAAAFFFFFFFFFFFLLLLLLLLHHHHHHHHHHWWWWWWWWWWWWWWYYYYYYYYYYYYTTTTTTTGGGGEEEEEEEEEGGGGMMMMMMMMDDDDDDDDEEEEEEEEEMMMMMMMMEEEEEEEEEFFFFFFFFFFFTTTTTTTEEEEEEEEEAAAAAEEEEEEEEESSSSSSNNNNNNNNMMMMMMMMNNNNNNNNDDDDDDDDLLLLLLLLVVVVVVVSSSSSSEEEEEEEEEYYYYYYYYYYYYQQQQQQQQQQQQQQQQQQYYYYYYYYYYYYQQQQQQQQQDDDDDDDDAAAAATTTTTTTAAAAAEEEEEEEEEEEEEEEEEEEEEEEEEEEGGGGEEEEEEEEEFFFFFFFFFFFEEEEEEEEEEEEEEEEEEEEEEEEEEEGGGGEEEEEEEEEEEEEEEEEEEEEEEEEEELLLLLLLLAAAAAA

SEQ ID NO: 119 - protein, 3504 aa, Galactomyces geotrichum
MMMMMMMMRRRRRRRRRRREEEEEEEEEIIIIIIIIIIIIIIIIHHHHHHHHHHVVVVVVVSSSSSSAAAAAGGGGQQQQQQQQQCCCCCCGGGGNNNNNNNNQQQQQQQQQIIIIIIIIGGGGAAAAAAAAAAFFFFFFFFFFFWWWWWWWWWWWWWWEEEEEEEEETTTTTTTIIIIIIIISSSSSSGGGGEEEEEEEEEHHHHHHHHHHGGGGIIIIIIIINNNNNNNNPPPPPPPSSSSSSAAAAAIIIIIIIIYYYYYYYYYYYYEEEEEEEEEGGGGTTTTTTTDDDDDDDDPPPPPPPLLLLLLLLQQQQQQQQQLLLLLLLLEEEEEEEEERRRRRRRRRRRLLLLLLLLSSSSSSVVVVVVVYYYYYYYYYYYYYYYYYYYYYYYYNNNNNNNNEEEEEEEEEAAAAAGGGGNNNNNNNNGGGGKKKKKKKKKYYYYYYYYYYYYVVVVVVVPPPPPPPRRRRRRRRRRRAAAAAVVVVVVVLLLLLLLLVVVVVVVDDDDDDDDLLLLLLLLEEEEEEEEEPPPPPPPGGGGVVVVVVVMMMMMMMMDDDDDDDDAAAAAVVVVVVVRRRRRRRRRRRSSSSSSGGGGTTTTTTTYYYYYYYYYYYYGGGGNNNNNNNNLLLLLLLLFFFFFFFFFFFRRRRRRRRRRRPPPPPPPDDDDDDDDNNNNNNNNFFFFFFFFFFFIIIIIIIIFFFFFFFFFFFGGGGQQQQQQQQQSSSSSSGGGGAAAAAGGGGNNNNNNNNNNNNNNNNWWWWWWWWWWWWWWAAAAAKKKKKKKKKGGGGHHHHHHHHHHYYYYYYYYYYYYTTTTTTTEEEEEEEEEGGGGAAAAAEEEEEEEEELLLLLLLLVVVVVVVDDDDDDDDSSSSSSVVVVVVVLLLLLLLLDDDDDDDDIIIIIIIIVVVVVVVRRRRRRRRRRRRRRRRRRRRRREEEEEEEEEAAAAAEEEEEEEEENNNNNNNNSSSSSSDDDDDDDDSSSSSSLLLLLLLLQQQQQQQQQGGGGFFFFFFFFFFFQQQQQQQQQIIIIIIIISSSSSSHHHHHHHHHHSSSSSSLLLLLLLLGGGGGGGGGGGGTTTTTTTGGGGSSSSSSGGGGMMMMMMMMGGGGTTTTTTTLLLLLLLLLLLLLLLLIIIIIIIISSSSSSKKKKKKKKKIIIIIIIIRRRRRRRRRRREEEEEEEEEEEEEEEEEEYYYYYYYYYYYYPPPPPPPDDDDDDDDRRRRRRRRRRRMMMMMMMMMMMMMMMMAAAAATTTTTTTFFFFFFFFFFFSSSSSSVVVVVVVVVVVVVVPPPPPPPSSSSSSPPPPPPPKKKKKKKKKVVVVVVVSSSSSSDDDDDDDDTTTTTTTIIIIIIIIVVVVVVVEEEEEEEEEPPPPPPPYYYYYYYYYYYYNNNNNNNNAAAAATTTTTTTLLLLLLLLSSSSSSVVVVVVVHHHHHHHHHHQQQQQQQQQLLLLLLLLIIIIIIIIEEEEEEEEENNNNNNNNAAAAADDDDDDDDEEEEEEEEETTTTTTTFFFFFFFFFFFCCCCCCIIIIIIIIDDDDDDDDNNNNNNNNEEEEEEEEEAAAAALLLLLLLLYYYYYYYYYYYYDDDDDDDDIIIIIIIICCCCCCQQQQQQQQQHHHHHHHHHHTTTTTTTLLLLLLLLKKKKKKKKKLLLLLLLLKKKKKKKKKQQQQQQQQQPPPPPPPTTTTTTTHHHHHHHHHHAAAAADDDDDDDDLLLLLLLLNNNNNNNNQQQQQQQQQLLLLLLLLVVVVVVVSSSSSSGGGGVVVVVVVMMMMMMMMSSSSSSGGGGIIIIIIIITTTTTTTTTTTTTTCCCCCCLLLLLLLLRRRRRRRRRRRFFFFFFFFFFFPPPPPPPGGGGQQQQQQQQQLLLLLLLLNNNNNNNNSSSSSSDDDDDDDDLLLLLLLLRRRRRRRRRRRKKKKKKKKKLLLLLLLLAAAAAVVVVVVVNNNNNNNNLLLLLLLLVVVVVVVPPPPPPPFFFFFFFFFFFPPPPPPPRRRRRRRRRRRLLLLLLLLHHHHHHHHHHFFFFFFFFFFFFFFFFFFFFFFMMMMMMMMVVVVVVVGGGGYYYYYYYYYYYYAAAAAPPPPPPPLLLLLLLLSSSSSSAAAAAPPPPPPPGGGGQQQQQQQQQQQQQQQQQQSSSSSSFFFFFFFFFFFRRRRRRRRRRRSSSSSSLLLLLLLLTTTTTTTVVVVVVVPPPPPPPEEEEEEEEELLLLLLLLTTTTTTTQQQQQQQQQQQQQQQQQQLLLLLLLLFFFFFFFFFFFDDDDDDDDSSSSSSKKKKKKKKKNNNNNNNNMMMMMMMMMMMMMMMMAAAAAAAAAASSSSSSDDDDDDDDPPPPPPPKKKKKKKKKRRRRRRRRRRRGGGGRRRRRRRRRRRYYYYYYYYYYYYLLLLLLLLTTTTTTTVVVVVVVAAAAAAAAAAFFFFFFFFFFFFFFFFFFFFFFRRRRRRRRRRRGGGGKKKKKKKKKVVVVVVVSSSSSSIIIIIIIIKKKKKKKKKEEEEEEEEEVVVVVVVEEEEEEEEEDDDDDDDDQQQQQQQQQMMMMMMMMRRRRRRRRRRRSSSSSSVVVVVVVQQQQQQQQQEEEEEEEEERRRRRRRRRRRNNNNNNNNSSSSSSAAAAAYYYYYYYYYYYYFFFFFFFFFFFVVVVVVVEEEEEEEEEWWWWWWWWWWWWWWIIIIIIIIPPPPPPPNNNNNNNNNNNNNNNNVVVVVVVQQQQQQQQQTTTTTTTAAAAAIIIIIIIICCCCCCSSSSSSVVVVVVVPPPPPPPPPPPPPPKKKKKKKKKDDDDDDDDVVVVVVVKKKKKKKKKMMMMMMMMSSSSSSAAAAATTTTTTTFFFFFFFFFFFIIIIIIIIAAAAANNNNNNNNSSSSSSTTTTTTTSSSSSSIIIIIIIIQQQQQQQQQEEEEEEEEELLLLLLLLFFFFFFFFFFFKKKKKKKKKRRRRRRRRRRRVVVVVVVGGGGDDDDDDDDQQQQQQQQQFFFFFFFFFFFSSSSSSAAAAAMMMMMMMMFFFFFFFFFFFRRRRRRRRRRRRRRRRRRRRRRKKKKKKKKKAAAAAFFFFFFFFFFFLLLLLLLLHHHHHHHHHHWWWWWWWWWWWWWWYYYYYYYYYYYYTTTTTTTNNNNNNNNEEEEEEEEEGGGGMMMMMMMMDDDDDDDDIIIIIIIITTTTTTTEEEEEEEEEFFFFFFFFFFFAAAAAEEEEEEEEEAAAAAEEEEEEEEESSSSSSNNNNNNNNMMMMMMMMNNNNNNNNDDDDDDDDLLLLLLLLVVVVVVVSSSSSSEEEEEEEEEYYYYYYYYYYYYQQQQQQQQQQQQQQQQQQYYYYYYYYYYYYQQQQQQQQQNNNNNNNNAAAAATTTTTTTVVVVVVVDDDDDDDDDDDDDDDDEEEEEEEEEDDDDDDDDMMMMMMMMEEEEEEEEEYYYYYYYYYYYYEEEEEEEEEDDDDDDDDEEEEEEEEELLLLLLLLPPPPPPPLLLLLLLLEEEEEEEEEDDDDDDDDEEEEEEEEEMMMMMMMMM

SEQ ID NO: 120 - protein, 3561 aa, Homarus americanus
MMMMMMMMRRRRRRRRRRREEEEEEEEEIIIIIIIIVVVVVVVHHHHHHHHHHLLLLLLLLQQQQQQQQQTTTTTTTGGGGQQQQQQQQQCCCCCCGGGGNNNNNNNNQQQQQQQQQIIIIIIIIGGGGTTTTTTTKKKKKKKKKFFFFFFFFFFFWWWWWWWWWWWWWWEEEEEEEEEIIIIIIIIIIIIIIIISSSSSSDDDDDDDDEEEEEEEEEHHHHHHHHHHGGGGIIIIIIIIQQQQQQQQQPPPPPPPTTTTTTTGGGGEEEEEEEEEYYYYYYYYYYYYTTTTTTTGGGGAAAAADDDDDDDDKKKKKKKKKDDDDDDDDLLLLLLLLMMMMMMMMEEEEEEEEELLLLLLLLQQQQQQQQQLLLLLLLLEEEEEEEEERRRRRRRRRRRIIIIIIIINNNNNNNNVVVVVVVYYYYYYYYYYYYYYYYYYYYYYYYNNNNNNNNEEEEEEEEEGGGGNNNNNNNNQQQQQQQQQGGGGKKKKKKKKKYYYYYYYYYYYYVVVVVVVPPPPPPPRRRRRRRRRRRAAAAAVVVVVVVLLLLLLLLVVVVVVVDDDDDDDDLLLLLLLLEEEEEEEEEPPPPPPPGGGGTTTTTTTMMMMMMMMDDDDDDDDSSSSSSVVVVVVVRRRRRRRRRRRAAAAAGGGGPPPPPPPHHHHHHHHHHGGGGQQQQQQQQQLLLLLLLLFFFFFFFFFFFKKKKKKKKKPPPPPPPDDDDDDDDSSSSSSFFFFFFFFFFFVVVVVVVFFFFFFFFFFFGGGGQQQQQQQQQSSSSSSGGGGAAAAAGGGGNNNNNNNNNNNNNNNNWWWWWWWWWWWWWWAAAAAKKKKKKKKKGGGGHHHHHHHHHHYYYYYYYYYYYYTTTTTTTEEEEEEEEEGGGGAAAAAEEEEEEEEELLLLLLLLVVVVVVVDDDDDDDDSSSSSSVVVVVVVLLLLLLLLDDDDDDDDVVVVVVVVVVVVVVRRRRRRRRRRRKKKKKKKKKEEEEEEEEEAAAAAEEEEEEEEEKKKKKKKKKCCCCCCDDDDDDDDCCCCCCLLLLLLLLQQQQQQQQQGGGGFFFFFFFFFFFQQQQQQQQQLLLLLLLLTTTTTTTHHHHHHHHHHSSSSSSLLLLLLLLGGGGGGGGGGGGTTTTTTTGGGGSSSSSSGGGGMMMMMMMMGGGGTTTTTTTLLLLLLLLLLLLLLLLVVVVVVVSSSSSSKKKKKKKKKIIIIIIIIRRRRRRRRRRREEEEEEEEEEEEEEEEEEFFFFFFFFFFFPPPPPPPDDDDDDDDRRRRRRRRRRRIIIIIIIIMMMMMMMMNNNNNNNNTTTTTTTFFFFFFFFFFFSSSSSSVVVVVVVVVVVVVVPPPPPPPSSSSSSPPPPPPPKKKKKKKKKVVVVVVVSSSSSSDDDDDDDDTTTTTTTVVVVVVVVVVVVVVEEEEEEEEEPPPPPPPYYYYYYYYYYYYNNNNNNNNAAAAATTTTTTTLLLLLLLLSSSSSSIIIIIIIIHHHHHHHHHHQQQQQQQQQLLLLLLLLVVVVVVVEEEEEEEEENNNNNNNNTTTTTTTDDDDDDDDEEEEEEEEETTTTTTTYYYYYYYYYYYYCCCCCCIIIIIIIIDDDDDDDDNNNNNNNNEEEEEEEEEAAAAALLLLLLLLYYYYYYYYYYYYDDDDDDDDIIIIIIIICCCCCCFFFFFFFFFFFRRRRRRRRRRRTTTTTTTLLLLLLLLKKKKKKKKKLLLLLLLLQQQQQQQQQNNNNNNNNPPPPPPPTTTTTTTYYYYYYYYYYYYGGGGDDDDDDDDLLLLLLLLNNNNNNNNHHHHHHHHHHLLLLLLLLVVVVVVVSSSSSSLLLLLLLLTTTTTTTMMMMMMMMSSSSSSGGGGVVVVVVVTTTTTTTTTTTTTTCCCCCCFFFFFFFFFFFRRRRRRRRRRRFFFFFFFFFFFPPPPPPPGGGGQQQQQQQQQLLLLLLLLNNNNNNNNAAAAADDDDDDDDLLLLLLLLRRRRRRRRRRRKKKKKKKKKLLLLLLLLAAAAAVVVVVVVNNNNNNNNMMMMMMMMVVVVVVVPPPPPPPFFFFFFFFFFFPPPPPPPRRRRRRRRRRRLLLLLLLLHHHHHHHHHHFFFFFFFFFFFFFFFFFFFFFFMMMMMMMMPPPPPPPGGGGFFFFFFFFFFFAAAAAPPPPPPPLLLLLLLLTTTTTTTAAAAARRRRRRRRRRRGGGGSSSSSSQQQQQQQQQQQQQQQQQQYYYYYYYYYYYYRRRRRRRRRRRAAAAALLLLLLLLTTTTTTTVVVVVVVPPPPPPPEEEEEEEEELLLLLLLLTTTTTTTQQQQQQQQQQQQQQQQQQMMMMMMMMFFFFFFFFFFFDDDDDDDDAAAAAKKKKKKKKKNNNNNNNNMMMMMMMMMMMMMMMMAAAAAAAAAACCCCCCDDDDDDDDPPPPPPPRRRRRRRRRRRHHHHHHHHHHGGGGRRRRRRRRRRRYYYYYYYYYYYYLLLLLLLLTTTTTTTVVVVVVVAAAAAAAAAAIIIIIIIIFFFFFFFFFFFRRRRRRRRRRRGGGGRRRRRRRRRRRMMMMMMMMSSSSSSMMMMMMMMKKKKKKKKKEEEEEEEEEVVVVVVVDDDDDDDDEEEEEEEEEQQQQQQQQQMMMMMMMMYYYYYYYYYYYYNNNNNNNNIIIIIIIIQQQQQQQQQNNNNNNNNKKKKKKKKKNNNNNNNNSSSSSSSSSSSSFFFFFFFFFFFFFFFFFFFFFFVVVVVVVEEEEEEEEEWWWWWWWWWWWWWWIIIIIIIIPPPPPPPNNNNNNNNNNNNNNNNVVVVVVVKKKKKKKKKTTTTTTTAAAAAVVVVVVVCCCCCCDDDDDDDDIIIIIIIIPPPPPPPPPPPPPPRRRRRRRRRRRGGGGIIIIIIIIKKKKKKKKKMMMMMMMMAAAAASSSSSSTTTTTTTFFFFFFFFFFFIIIIIIIIGGGGNNNNNNNNSSSSSSTTTTTTTAAAAAIIIIIIIIHHHHHHHHHHEEEEEEEEELLLLLLLLFFFFFFFFFFFKKKKKKKKKRRRRRRRRRRRVVVVVVVGGGGEEEEEEEEEQQQQQQQQQFFFFFFFFFFFTTTTTTTAAAAAMMMMMMMMFFFFFFFFFFFRRRRRRRRRRRRRRRRRRRRRRKKKKKKKKKAAAAAFFFFFFFFFFFLLLLLLLLHHHHHHHHHHWWWWWWWWWWWWWWYYYYYYYYYYYYTTTTTTTGGGGEEEEEEEEEGGGGMMMMMMMMDDDDDDDDEEEEEEEEEMMMMMMMMEEEEEEEEEFFFFFFFFFFFTTTTTTTEEEEEEEEEAAAAAEEEEEEEEESSSSSSNNNNNNNNMMMMMMMMNNNNNNNNDDDDDDDDLLLLLLLLVVVVVVVSSSSSSEEEEEEEEEYYYYYYYYYYYYQQQQQQQQQQQQQQQQQQYYYYYYYYYYYYQQQQQQQQQEEEEEEEEEAAAAATTTTTTTAAAAADDDDDDDDDDDDDDDDEEEEEEEEEAAAAAEEEEEEEEEFFFFFFFFFFFEEEEEEEEEEEEEEEEEEEEEEEEEEEGGGGEEEEEEEEEVVVVVVVEEEEEEEEEGGGGEEEEEEEEEYYYYYYYYYYYYAAAAAA

SEQ ID NO: 121 - protein, 3491 aa, Homo sapiens
MMMMMMMMRRRRRRRRRRREEEEEEEEEIIIIIIIIVVVVVVVHHHHHHHHHHIIIIIIIIQQQQQQQQQAAAAAGGGGQQQQQQQQQCCCCCCGGGGNNNNNNNNQQQQQQQQQIIIIIIIIGGGGAAAAAKKKKKKKKKFFFFFFFFFFFWWWWWWWWWWWWWWEEEEEEEEEVVVVVVVIIIIIIIISSSSSSDDDDDDDDEEEEEEEEEHHHHHHHHHHGGGGIIIIIIIIDDDDDDDDPPPPPPPTTTTTTTGGGGTTTTTTTYYYYYYYYYYYYHHHHHHHHHHGGGGDDDDDDDDSSSSSSDDDDDDDDLLLLLLLLQQQQQQQQQLLLLLLLLDDDDDDDDRRRRRRRRRRRIIIIIIIISSSSSSVVVVVVVYYYYYYYYYYYYYYYYYYYYYYYYNNNNNNNNEEEEEEEEEAAAAATTTTTTTGGGGGGGGKKKKKKKKKYYYYYYYYYYYYVVVVVVVPPPPPPPRRRRRRRRRRRAAAAAIIIIIIIILLLLLLLLVVVVVVVDDDDDDDDLLLLLLLLEEEEEEEEEPPPPPPPGGGGTTTTTTTMMMMMMMMDDDDDDDDSSSSSSVVVVVVVRRRRRRRRRRRSSSSSSGGGGPPPPPPPFFFFFFFFFFFGGGGQQQQQQQQQIIIIIIIIFFFFFFFFFFFRRRRRRRRRRRPPPPPPPDDDDDDDDNNNNNNNNFFFFFFFFFFFVVVVVVVFFFFFFFFFFFGGGGQQQQQQQQQSSSSSSGGGGAAAAAGGGGNNNNNNNNNNNNNNNNWWWWWWWWWWWWWWAAAAAKKKKKKKKKGGGGHHHHHHHHHHYYYYYYYYYYYYTTTTTTTEEEEEEEEEGGGGAAAAAEEEEEEEEELLLLLLLLVVVVVVVDDDDDDDDSSSSSSVVVVVVVLLLLLLLLDDDDDDDDVVVVVVVVVVVVVVRRRRRRRRRRRKKKKKKKKKEEEEEEEEEAAAAAEEEEEEEEESSSSSSCCCCCCDDDDDDDDCCCCCCLLLLLLLLQQQQQQQQQGGGGFFFFFFFFFFFQQQQQQQQQLLLLLLLLTTTTTTTHHHHHHHHHHSSSSSSLLLLLLLLGGGGGGGGGGGGTTTTTTTGGGGSSSSSSGGGGMMMMMMMMGGGGTTTTTTTLLLLLLLLLLLLLLLLIIIIIIIISSSSSSKKKKKKKKKIIIIIIIIRRRRRRRRRRREEEEEEEEEEEEEEEEEEYYYYYYYYYYYYPPPPPPPDDDDDDDDRRRRRRRRRRRIIIIIIIIMMMMMMMMNNNNNNNNTTTTTTTFFFFFFFFFFFSSSSSSVVVVVVVVVVVVVVPPPPPPPSSSSSSPPPPPPPKKKKKKKKKVVVVVVVSSSSSSDDDDDDDDTTTTTTTVVVVVVVVVVVVVVEEEEEEEEEPPPPPPPYYYYYYYYYYYYNNNNNNNNAAAAATTTTTTTLLLLLLLLSSSSSSVVVVVVVHHHHHHHHHHQQQQQQQQQLLLLLLLLVVVVVVVEEEEEEEEENNNNNNNNTTTTTTTDDDDDDDDEEEEEEEEETTTTTTTYYYYYYYYYYYYCCCCCCIIIIIIIIDDDDDDDDNNNNNNNNEEEEEEEEEAAAAALLLLLLLLYYYYYYYYYYYYDDDDDDDDIIIIIIIICCCCCCFFFFFFFFFFFRRRRRRRRRRRTTTTTTTLLLLLLLLRRRRRRRRRRRLLLLLLLLTTTTTTTTTTTTTTPPPPPPPTTTTTTTYYYYYYYYYYYYGGGGDDDDDDDDLLLLLLLLNNNNNNNNHHHHHHHHHHLLLLLLLLVVVVVVVSSSSSSGGGGTTTTTTTMMMMMMMMEEEEEEEEECCCCCCVVVVVVVTTTTTTTTTTTTTTCCCCCCLLLLLLLLRRRRRRRRRRRFFFFFFFFFFFPPPPPPPGGGGQQQQQQQQQLLLLLLLLNNNNNNNNAAAAADDDDDDDDLLLLLLLLRRRRRRRRRRRKKKKKKKKKLLLLLLLLAAAAAVVVVVVVNNNNNNNNMMMMMMMMVVVVVVVPPPPPPPFFFFFFFFFFFPPPPPPPRRRRRRRRRRRLLLLLLLLHHHHHHHHHHFFFFFFFFFFFFFFFFFFFFFFMMMMMMMMPPPPPPPGGGGFFFFFFFFFFFAAAAAPPPPPPPLLLLLLLLTTTTTTTSSSSSSRRRRRRRRRRRGGGGSSSSSSQQQQQQQQQQQQQQQQQQYYYYYYYYYYYYRRRRRRRRRRRAAAAALLLLLLLLTTTTTTTVVVVVVVPPPPPPPDDDDDDDDLLLLLLLLTTTTTTTQQQQQQQQQQQQQQQQQQVVVVVVVFFFFFFFFFFFDDDDDDDDAAAAAKKKKKKKKKNNNNNNNNMMMMMMMMMMMMMMMMAAAAAAAAAACCCCCCDDDDDDDDPPPPPPPRRRRRRRRRRRHHHHHHHHHHGGGGRRRRRRRRRRRYYYYYYYYYYYYLLLLLLLLTTTTTTTVVVVVVVAAAAAAAAAAVVVVVVVFFFFFFFFFFFRRRRRRRRRRRGGGGRRRRRRRRRRRMMMMMMMMSSSSSSMMMMMMMMKKKKKKKKKEEEEEEEEEVVVVVVVDDDDDDDDEEEEEEEEEQQQQQQQQQMMMMMMMMLLLLLLLLNNNNNNNNVVVVVVVQQQQQQQQQNNNNNNNNKKKKKKKKKNNNNNNNNSSSSSSSSSSSSYYYYYYYYYYYYFFFFFFFFFFFVVVVVVVEEEEEEEEEWWWWWWWWWWWWWWIIIIIIIIPPPPPPPNNNNNNNNNNNNNNNNVVVVVVVKKKKKKKKKTTTTTTTAAAAAVVVVVVVCCCCCCDDDDDDDDIIIIIIIIPPPPPPPPPPPPPPRRRRRRRRRRRGGGGLLLLLLLLKKKKKKKKKMMMMMMMMAAAAAVVVVVVVTTTTTTTFFFFFFFFFFFIIIIIIIIGGGGNNNNNNNNSSSSSSTTTTTTTAAAAAIIIIIIIIQQQQQQQQQEEEEEEEEELLLLLLLLFFFFFFFFFFFKKKKKKKKKRRRRRRRRRRRIIIIIIIISSSSSSEEEEEEEEEQQQQQQQQQFFFFFFFFFFFTTTTTTTAAAAAMMMMMMMMFFFFFFFFFFFRRRRRRRRRRRRRRRRRRRRRRKKKKKKKKKAAAAAFFFFFFFFFFFLLLLLLLLHHHHHHHHHHWWWWWWWWWWWWWWYYYYYYYYYYYYTTTTTTTGGGGEEEEEEEEEGGGGMMMMMMMMDDDDDDDDEEEEEEEEEMMMMMMMMEEEEEEEEEFFFFFFFFFFFTTTTTTTEEEEEEEEEAAAAAEEEEEEEEESSSSSSNNNNNNNNMMMMMMMMNNNNNNNNDDDDDDDDLLLLLLLLVVVVVVVSSSSSSEEEEEEEEEYYYYYYYYYYYYQQQQQQQQQQQQQQQQQQYYYYYYYYYYYYQQQQQQQQQDDDDDDDDAAAAATTTTTTTAAAAAEEEEEEEEEEEEEEEEEEEEEEEEEEEEEEEEEEEEDDDDDDDDFFFFFFFFFFFGGGGEEEEEEEEEEEEEEEEEEAAAAAEEEEEEEEEEEEEEEEEEEEEEEEEEEAAAAAA

SEQ ID NO: 122 - protein, 3512 aa, Lupinus albus
MMMMMMMMRRRRRRRRRRREEEEEEEEEIIIIIIIILLLLLLLLHHHHHHHHHHIIIIIIIIQQQQQQQQQGGGGGGGGQQQQQQQQQCCCCCCGGGGNNNNNNNNQQQQQQQQQIIIIIIIIGGGGAAAAAKKKKKKKKKFFFFFFFFFFFWWWWWWWWWWWWWWEEEEEEEEEVVVVVVVVVVVVVVCCCCCCAAAAAEEEEEEEEEHHHHHHHHHHGGGGIIIIIIIIDDDDDDDDSSSSSSTTTTTTTGGGGRRRRRRRRRRRYYYYYYYYYYYYGGGGGGGGDDDDDDDDNNNNNNNNEEEEEEEEELLLLLLLLQQQQQQQQQLLLLLLLLEEEEEEEEERRRRRRRRRRRVVVVVVVNNNNNNNNVVVVVVVYYYYYYYYYYYYYYYYYYYYYYYYNNNNNNNNEEEEEEEEEAAAAASSSSSSCCCCCCGGGGRRRRRRRRRRRFFFFFFFFFFFVVVVVVVPPPPPPPRRRRRRRRRRRAAAAAVVVVVVVLLLLLLLLMMMMMMMMDDDDDDDDLLLLLLLLEEEEEEEEEPPPPPPPGGGGTTTTTTTMMMMMMMMDDDDDDDDSSSSSSVVVVVVVRRRRRRRRRRRSSSSSSGGGGPPPPPPPYYYYYYYYYYYYGGGGQQQQQQQQQIIIIIIIIFFFFFFFFFFFRRRRRRRRRRRPPPPPPPDDDDDDDDNNNNNNNNFFFFFFFFFFFVVVVVVVFFFFFFFFFFFGGGGQQQQQQQQQSSSSSSGGGGAAAAAGGGGNNNNNNNNNNNNNNNNWWWWWWWWWWWWWWAAAAAKKKKKKKKKGGGGHHHHHHHHHHYYYYYYYYYYYYTTTTTTTEEEEEEEEEGGGGAAAAAEEEEEEEEELLLLLLLLIIIIIIIIDDDDDDDDSSSSSSVVVVVVVLLLLLLLLDDDDDDDDVVVVVVVVVVVVVVRRRRRRRRRRRKKKKKKKKKEEEEEEEEEAAAAAEEEEEEEEENNNNNNNNCCCCCCDDDDDDDDCCCCCCLLLLLLLLQQQQQQQQQGGGGFFFFFFFFFFFQQQQQQQQQVVVVVVVCCCCCCHHHHHHHHHHSSSSSSLLLLLLLLGGGGGGGGGGGGTTTTTTTGGGGSSSSSSGGGGMMMMMMMMGGGGTTTTTTTLLLLLLLLLLLLLLLLIIIIIIIISSSSSSKKKKKKKKKIIIIIIIIRRRRRRRRRRREEEEEEEEEEEEEEEEEEYYYYYYYYYYYYPPPPPPPDDDDDDDDRRRRRRRRRRRMMMMMMMMMMMMMMMMLLLLLLLLTTTTTTTFFFFFFFFFFFSSSSSSVVVVVVVFFFFFFFFFFFPPPPPPPSSSSSSPPPPPPPKKKKKKKKKVVVVVVVSSSSSSDDDDDDDDTTTTTTTVVVVVVVVVVVVVVEEEEEEEEEPPPPPPPYYYYYYYYYYYYNNNNNNNNAAAAATTTTTTTLLLLLLLLSSSSSSVVVVVVVHHHHHHHHHHQQQQQQQQQLLLLLLLLVVVVVVVEEEEEEEEENNNNNNNNAAAAADDDDDDDDEEEEEEEEECCCCCCMMMMMMMMVVVVVVVLLLLLLLLDDDDDDDDNNNNNNNNEEEEEEEEEAAAAALLLLLLLLYYYYYYYYYYYYDDDDDDDDIIIIIIIICCCCCCFFFFFFFFFFFRRRRRRRRRRRTTTTTTTLLLLLLLLKKKKKKKKKLLLLLLLLTTTTTTTTTTTTTTPPPPPPPSSSSSSFFFFFFFFFFFGGGGDDDDDDDDLLLLLLLLNNNNNNNNHHHHHHHHHHLLLLLLLLIIIIIIIISSSSSSAAAAATTTTTTTMMMMMMMMSSSSSSGGGGVVVVVVVTTTTTTTCCCCCCCCCCCCLLLLLLLLRRRRRRRRRRRFFFFFFFFFFFPPPPPPPGGGGQQQQQQQQQLLLLLLLLNNNNNNNNSSSSSSDDDDDDDDLLLLLLLLRRRRRRRRRRRKKKKKKKKKLLLLLLLLAAAAAVVVVVVVNNNNNNNNLLLLLLLLIIIIIIIIPPPPPPPFFFFFFFFFFFPPPPPPPRRRRRRRRRRRLLLLLLLLHHHHHHHHHHFFFFFFFFFFFFFFFFFFFFFFMMMMMMMMVVVVVVVGGGGFFFFFFFFFFFAAAAAPPPPPPPLLLLLLLLTTTTTTTSSSSSSRRRRRRRRRRRGGGGSSSSSSQQQQQQQQQQQQQQQQQQYYYYYYYYYYYYRRRRRRRRRRRAAAAALLLLLLLLTTTTTTTVVVVVVVPPPPPPPEEEEEEEEELLLLLLLLTTTTTTTQQQQQQQQQQQQQQQQQQMMMMMMMMWWWWWWWWWWWWWWDDDDDDDDAAAAAKKKKKKKKKNNNNNNNNMMMMMMMMMMMMMMMMCCCCCCAAAAAAAAAADDDDDDDDPPPPPPPRRRRRRRRRRRHHHHHHHHHHGGGGRRRRRRRRRRRYYYYYYYYYYYYLLLLLLLLTTTTTTTAAAAASSSSSSAAAAAMMMMMMMMFFFFFFFFFFFRRRRRRRRRRRGGGGKKKKKKKKKMMMMMMMMSSSSSSTTTTTTTKKKKKKKKKEEEEEEEEEVVVVVVVDDDDDDDDEEEEEEEEEQQQQQQQQQMMMMMMMMIIIIIIIINNNNNNNNVVVVVVVQQQQQQQQQNNNNNNNNKKKKKKKKKNNNNNNNNSSSSSSSSSSSSYYYYYYYYYYYYFFFFFFFFFFFVVVVVVVEEEEEEEEEWWWWWWWWWWWWWWIIIIIIIIPPPPPPPNNNNNNNNNNNNNNNNVVVVVVVKKKKKKKKKSSSSSSTTTTTTTVVVVVVVCCCCCCDDDDDDDDIIIIIIIIPPPPPPPPPPPPPPTTTTTTTGGGGLLLLLLLLKKKKKKKKKMMMMMMMMAAAAASSSSSSTTTTTTTFFFFFFFFFFFIIIIIIIIGGGGNNNNNNNNSSSSSSTTTTTTTSSSSSSIIIIIIIIQQQQQQQQQEEEEEEEEEMMMMMMMMFFFFFFFFFFFRRRRRRRRRRRRRRRRRRRRRRVVVVVVVSSSSSSEEEEEEEEEQQQQQQQQQFFFFFFFFFFFTTTTTTTAAAAAMMMMMMMMFFFFFFFFFFFRRRRRRRRRRRRRRRRRRRRRRKKKKKKKKKAAAAAFFFFFFFFFFFLLLLLLLLHHHHHHHHHHWWWWWWWWWWWWWWYYYYYYYYYYYYTTTTTTTGGGGEEEEEEEEEGGGGMMMMMMMMDDDDDDDDEEEEEEEEEMMMMMMMMEEEEEEEEEFFFFFFFFFFFTTTTTTTEEEEEEEEEAAAAAEEEEEEEEESSSSSSNNNNNNNNMMMMMMMMNNNNNNNNDDDDDDDDLLLLLLLLVVVVVVVSSSSSSEEEEEEEEEYYYYYYYYYYYYQQQQQQQQQQQQQQQQQQYYYYYYYYYYYYQQQQQQQQQDDDDDDDDAAAAATTTTTTTAAAAADDDDDDDDEEEEEEEEEDDDDDDDDGGGGYYYYYYYYYYYYEEEEEEEEEYYYYYYYYYYYYEEEEEEEEEDDDDDDDDEEEEEEEEEEEEEEEEEEEEEEEEEEEIIIIIIIIGGGGEEEEEEEEEEEEEEEEEEAAAAAA

SEQ ID NO: 123 - protein, 3496 aa, Zea mays
MMMMMMMMRRRRRRRRRRREEEEEEEEEIIIIIIIILLLLLLLLHHHHHHHHHHIIIIIIIIQQQQQQQQQGGGGGGGGQQQQQQQQQCCCCCCGGGGNNNNNNNNQQQQQQQQQIIIIIIIIGGGGAAAAAKKKKKKKKKFFFFFFFFFFFWWWWWWWWWWWWWWEEEEEEEEEVVVVVVVVVVVVVVCCCCCCAAAAAEEEEEEEEEHHHHHHHHHHGGGGIIIIIIIIDDDDDDDDAAAAATTTTTTTGGGGRRRRRRRRRRRYYYYYYYYYYYYGGGGGGGGDDDDDDDDSSSSSSDDDDDDDDLLLLLLLLQQQQQQQQQLLLLLLLLEEEEEEEEERRRRRRRRRRRVVVVVVVNNNNNNNNVVVVVVVYYYYYYYYYYYYYYYYYYYYYYYYNNNNNNNNEEEEEEEEEAAAAASSSSSSCCCCCCGGGGRRRRRRRRRRRFFFFFFFFFFFVVVVVVVPPPPPPPRRRRRRRRRRRAAAAAVVVVVVVLLLLLLLLMMMMMMMMDDDDDDDDLLLLLLLLEEEEEEEEEPPPPPPPGGGGTTTTTTTMMMMMMMMDDDDDDDDSSSSSSVVVVVVVRRRRRRRRRRRSSSSSSGGGGPPPPPPPYYYYYYYYYYYYGGGGHHHHHHHHHHIIIIIIIIFFFFFFFFFFFRRRRRRRRRRRPPPPPPPDDDDDDDDNNNNNNNNFFFFFFFFFFFVVVVVVVFFFFFFFFFFFGGGGQQQQQQQQQSSSSSSGGGGAAAAAGGGGNNNNNNNNNNNNNNNNSSSSSSAAAAAKKKKKKKKKGGGGHHHHHHHHHHYYYYYYYYYYYYTTTTTTTEEEEEEEEEGGGGAAAAAEEEEEEEEELLLLLLLLIIIIIIIIDDDDDDDDSSSSSSVVVVVVVLLLLLLLLDDDDDDDDVVVVVVVVVVVVVVRRRRRRRRRRRKKKKKKKKKEEEEEEEEEAAAAAEEEEEEEEENNNNNNNNCCCCCCDDDDDDDDCCCCCCLLLLLLLLQQQQQQQQQGGGGFFFFFFFFFFFQQQQQQQQQVVVVVVVCCCCCCHHHHHHHHHHSSSSSSLLLLLLLLGGGGGGGGGGGGTTTTTTTGGGGSSSSSSAAAAAMMMMMMMMGGGGTTTTTTTLLLLLLLLLLLLLLLLIIIIIIIISSSSSSKKKKKKKKKIIIIIIIIRRRRRRRRRRREEEEEEEEEEEEEEEEEEYYYYYYYYYYYYPPPPPPPDDDDDDDDRRRRRRRRRRRMMMMMMMMMMMMMMMMLLLLLLLLTTTTTTTFFFFFFFFFFFSSSSSSVVVVVVVFFFFFFFFFFFPPPPPPPSSSSSSPPPPPPPKKKKKKKKKVVVVVVVSSSSSSDDDDDDDDTTTTTTTVVVVVVVVVVVVVVEEEEEEEEEPPPPPPPYYYYYYYYYYYYNNNNNNNNAAAAATTTTTTTLLLLLLLLSSSSSSVVVVVVVHHHHHHHHHHQQQQQQQQQLLLLLLLLVVVVVVVEEEEEEEEENNNNNNNNAAAAADDDDDDDDEEEEEEEEECCCCCCMMMMMMMMVVVVVVVLLLLLLLLDDDDDDDDNNNNNNNNEEEEEEEEEAAAAALLLLLLLLYYYYYYYYYYYYDDDDDDDDIIIIIIIICCCCCCFFFFFFFFFFFRRRRRRRRRRRTTTTTTTLLLLLLLLKKKKKKKKKLLLLLLLLTTTTTTTTTTTTTTPPPPPPPSSSSSSFFFFFFFFFFFGGGGDDDDDDDDLLLLLLLLNNNNNNNNHHHHHHHHHHLLLLLLLLIIIIIIIISSSSSSAAAAATTTTTTTMMMMMMMMSSSSSSGGGGVVVVVVVTTTTTTTCCCCCCCCCCCCLLLLLLLLRRRRRRRRRRRFFFFFFFFFFFPPPPPPPGGGGQQQQQQQQQLLLLLLLLNNNNNNNNSSSSSSDDDDDDDDLLLLLLLLRRRRRRRRRRRKKKKKKKKKLLLLLLLLAAAAAVVVVVVVNNNNNNNNLLLLLLLLIIIIIIIIPPPPPPPFFFFFFFFFFFPPPPPPPRRRRRRRRRRRLLLLLLLLHHHHHHHHHHFFFFFFFFFFFFFFFFFFFFFFMMMMMMMMVVVVVVVGGGGFFFFFFFFFFFAAAAAPPPPPPPLLLLLLLLTTTTTTTSSSSSSRRRRRRRRRRRGGGGSSSSSSQQQQQQQQQQQQQQQQQQYYYYYYYYYYYYRRRRRRRRRRRAAAAALLLLLLLLTTTTTTTVVVVVVVPPPPPPPEEEEEEEEELLLLLLLLTTTTTTTQQQQQQQQQQQQQQQQQQMMMMMMMMWWWWWWWWWWWWWWDDDDDDDDAAAAAKKKKKKKKKNNNNNNNNMMMMMMMMMMMMMMMMCCCCCCAAAAAAAAAADDDDDDDDPPPPPPPRRRRRRRRRRRHHHHHHHHHHGGGGRRRRRRRRRRRYYYYYYYYYYYYLLLLLLLLTTTTTTTAAAAASSSSSSAAAAAMMMMMMMMFFFFFFFFFFFRRRRRRRRRRRGGGGKKKKKKKKKMMMMMMMMSSSSSSTTTTTTTKKKKKKKKKEEEEEEEEEVVVVVVVDDDDDDDDEEEEEEEEEQQQQQQQQQMMMMMMMMLLLLLLLLNNNNNNNNVVVVVVVQQQQQQQQQNNNNNNNNKKKKKKKKKNNNNNNNNSSSSSSSSSSSSYYYYYYYYYYYYFFFFFFFFFFFVVVVVVVEEEEEEEEEWWWWWWWWWWWWWWIIIIIIIIPPPPPPPNNNNNNNNNNNNNNNNVVVVVVVKKKKKKKKKSSSSSSTTTTTTTVVVVVVVCCCCCCDDDDDDDDIIIIIIIIPPPPPPPPPPPPPPHHHHHHHHHHGGGGLLLLLLLLKKKKKKKKKMMMMMMMMAAAAASSSSSSTTTTTTTFFFFFFFFFFFIIIIIIIIGGGGNNNNNNNNSSSSSSTTTTTTTSSSSSSIIIIIIIIQQQQQQQQQEEEEEEEEEMMMMMMMMFFFFFFFFFFFRRRRRRRRRRRRRRRRRRRRRRVVVVVVVSSSSSSEEEEEEEEEQQQQQQQQQFFFFFFFFFFFTTTTTTTAAAAAMMMMMMMMFFFFFFFFFFFRRRRRRRRRRRRRRRRRRRRRRKKKKKKKKKAAAAAFFFFFFFFFFFLLLLLLLLHHHHHHHHHHWWWWWWWWWWWWWWYYYYYYYYYYYYTTTTTTTGGGGEEEEEEEEEGGGGMMMMMMMMDDDDDDDDEEEEEEEEEMMMMMMMMEEEEEEEEEFFFFFFFFFFFTTTTTTTEEEEEEEEEAAAAAEEEEEEEEESSSSSSNNNNNNNNMMMMMMMMNNNNNNNNDDDDDDDDLLLLLLLLVVVVVVVSSSSSSEEEEEEEEEYYYYYYYYYYYYQQQQQQQQQQQQQQQQQQYYYYYYYYYYYYQQQQQQQQQDDDDDDDDAAAAATTTTTTTAAAAADDDDDDDDEEEEEEEEEEEEEEEEEEGGGGEEEEEEEEEYYYYYYYYYYYYEEEEEEEEEDDDDDDDDEEEEEEEEEEEEEEEEEEEEEEEEEEEGGGGDDDDDDDDLLLLLLLLQQQQQQQQQDDDDDDDDD

SEQ ID NO: 124 - protein, 3524 aa, Manduca sexta
MMMMMMMMRRRRRRRRRRREEEEEEEEEIIIIIIIIVVVVVVVHHHHHHHHHHIIIIIIIIQQQQQQQQQAAAAAGGGGQQQQQQQQQCCCCCCGGGGNNNNNNNNQQQQQQQQQIIIIIIIIGGGGAAAAAKKKKKKKKKFFFFFFFFFFFWWWWWWWWWWWWWWEEEEEEEEEIIIIIIIIIIIIIIIISSSSSSDDDDDDDDEEEEEEEEEHHHHHHHHHHGGGGIIIIIIIIDDDDDDDDPPPPPPPTTTTTTTGGGGAAAAAYYYYYYYYYYYYHHHHHHHHHHGGGGDDDDDDDDSSSSSSDDDDDDDDLLLLLLLLQQQQQQQQQLLLLLLLLEEEEEEEEERRRRRRRRRRRIIIIIIIINNNNNNNNVVVVVVVYYYYYYYYYYYYYYYYYYYYYYYYNNNNNNNNEEEEEEEEEAAAAASSSSSSGGGGGGGGKKKKKKKKKYYYYYYYYYYYYVVVVVVVPPPPPPPRRRRRRRRRRRAAAAAIIIIIIIILLLLLLLLVVVVVVVDDDDDDDDLLLLLLLLEEEEEEEEEPPPPPPPGGGGTTTTTTTMMMMMMMMDDDDDDDDSSSSSSVVVVVVVRRRRRRRRRRRSSSSSSGGGGPPPPPPPFFFFFFFFFFFGGGGQQQQQQQQQIIIIIIIIFFFFFFFFFFFRRRRRRRRRRRPPPPPPPDDDDDDDDNNNNNNNNFFFFFFFFFFFVVVVVVVFFFFFFFFFFFGGGGQQQQQQQQQSSSSSSGGGGAAAAAGGGGNNNNNNNNNNNNNNNNWWWWWWWWWWWWWWAAAAAKKKKKKKKKGGGGHHHHHHHHHHYYYYYYYYYYYYTTTTTTTEEEEEEEEEGGGGAAAAAEEEEEEEEELLLLLLLLVVVVVVVDDDDDDDDSSSSSSVVVVVVVLLLLLLLLDDDDDDDDVVVVVVVVVVVVVVRRRRRRRRRRRKKKKKKKKKEEEEEEEEEAAAAAEEEEEEEEESSSSSSCCCCCCDDDDDDDDCCCCCCLLLLLLLLQQQQQQQQQGGGGFFFFFFFFFFFQQQQQQQQQLLLLLLLLTTTTTTTHHHHHHHHHHSSSSSSLLLLLLLLGGGGGGGGGGGGTTTTTTTGGGGSSSSSSGGGGMMMMMMMMGGGGTTTTTTTLLLLLLLLLLLLLLLLIIIIIIIISSSSSSKKKKKKKKKIIIIIIIIRRRRRRRRRRREEEEEEEEEEEEEEEEEEYYYYYYYYYYYYPPPPPPPDDDDDDDDRRRRRRRRRRRIIIIIIIIMMMMMMMMNNNNNNNNTTTTTTTYYYYYYYYYYYYSSSSSSVVVVVVVVVVVVVVPPPPPPPSSSSSSPPPPPPPKKKKKKKKKVVVVVVVSSSSSSDDDDDDDDTTTTTTTVVVVVVVVVVVVVVEEEEEEEEEPPPPPPPYYYYYYYYYYYYNNNNNNNNAAAAATTTTTTTLLLLLLLLSSSSSSVVVVVVVHHHHHHHHHHQQQQQQQQQLLLLLLLLVVVVVVVEEEEEEEEENNNNNNNNTTTTTTTDDDDDDDDEEEEEEEEETTTTTTTYYYYYYYYYYYYCCCCCCIIIIIIIIDDDDDDDDNNNNNNNNEEEEEEEEEAAAAALLLLLLLLYYYYYYYYYYYYDDDDDDDDIIIIIIIICCCCCCFFFFFFFFFFFRRRRRRRRRRRTTTTTTTLLLLLLLLKKKKKKKKKLLLLLLLLSSSSSSTTTTTTTPPPPPPPTTTTTTTYYYYYYYYYYYYGGGGDDDDDDDDLLLLLLLLNNNNNNNNHHHHHHHHHHLLLLLLLLVVVVVVVSSSSSSLLLLLLLLTTTTTTTMMMMMMMMSSSSSSGGGGVVVVVVVTTTTTTTTTTTTTTCCCCCCLLLLLLLLRRRRRRRRRRRFFFFFFFFFFFPPPPPPPGGGGQQQQQQQQQLLLLLLLLNNNNNNNNAAAAADDDDDDDDLLLLLLLLRRRRRRRRRRRKKKKKKKKKLLLLLLLLAAAAAVVVVVVVNNNNNNNNMMMMMMMMVVVVVVVPPPPPPPFFFFFFFFFFFPPPPPPPRRRRRRRRRRRLLLLLLLLHHHHHHHHHHFFFFFFFFFFFFFFFFFFFFFFMMMMMMMMPPPPPPPGGGGFFFFFFFFFFFAAAAAPPPPPPPLLLLLLLLTTTTTTTSSSSSSRRRRRRRRRRRGGGGSSSSSSQQQQQQQQQQQQQQQQQQYYYYYYYYYYYYRRRRRRRRRRRAAAAALLLLLLLLTTTTTTTVVVVVVVPPPPPPPEEEEEEEEELLLLLLLLTTTTTTTQQQQQQQQQQQQQQQQQQMMMMMMMMFFFFFFFFFFFDDDDDDDDAAAAAKKKKKKKKKNNNNNNNNMMMMMMMMMMMMMMMMAAAAAAAAAACCCCCCDDDDDDDDPPPPPPPRRRRRRRRRRRHHHHHHHHHHGGGGRRRRRRRRRRRYYYYYYYYYYYYLLLLLLLLTTTTTTTVVVVVVVAAAAAAAAAAIIIIIIIIFFFFFFFFFFFRRRRRRRRRRRGGGGRRRRRRRRRRRMMMMMMMMSSSSSSMMMMMMMMKKKKKKKKKEEEEEEEEEVVVVVVVDDDDDDDDEEEEEEEEEQQQQQQQQQMMMMMMMMLLLLLLLLNNNNNNNNIIIIIIIIQQQQQQQQQNNNNNNNNKKKKKKKKKNNNNNNNNSSSSSSSSSSSSYYYYYYYYYYYYFFFFFFFFFFFVVVVVVVEEEEEEEEEWWWWWWWWWWWWWWIIIIIIIIPPPPPPPNNNNNNNNNNNNNNNNVVVVVVVKKKKKKKKKTTTTTTTAAAAAVVVVVVVCCCCCCDDDDDDDDIIIIIIIIPPPPPPPPPPPPPPRRRRRRRRRRRGGGGLLLLLLLLKKKKKKKKKMMMMMMMMSSSSSSAAAAATTTTTTTFFFFFFFFFFFIIIIIIIIGGGGNNNNNNNNSSSSSSTTTTTTTAAAAAIIIIIIIIQQQQQQQQQEEEEEEEEELLLLLLLLFFFFFFFFFFFKKKKKKKKKRRRRRRRRRRRIIIIIIIISSSSSSEEEEEEEEEQQQQQQQQQFFFFFFFFFFFTTTTTTTAAAAAMMMMMMMMFFFFFFFFFFFRRRRRRRRRRRRRRRRRRRRRRKKKKKKKKKAAAAAFFFFFFFFFFFLLLLLLLLHHHHHHHHHHWWWWWWWWWWWWWWYYYYYYYYYYYYTTTTTTTGGGGEEEEEEEEEGGGGMMMMMMMMDDDDDDDDEEEEEEEEEMMMMMMMMEEEEEEEEEFFFFFFFFFFFTTTTTTTEEEEEEEEEAAAAAEEEEEEEEESSSSSSNNNNNNNNMMMMMMMMNNNNNNNNDDDDDDDDLLLLLLLLVVVVVVVSSSSSSEEEEEEEEEYYYYYYYYYYYYQQQQQQQQQQQQQQQQQQYYYYYYYYYYYYQQQQQQQQQEEEEEEEEEAAAAATTTTTTTAAAAADDDDDDDDEEEEEEEEEDDDDDDDDAAAAAEEEEEEEEEFFFFFFFFFFFDDDDDDDDEEEEEEEEEEEEEEEEEEQQQQQQQQQEEEEEEEEEQQQQQQQQQEEEEEEEEEIIIIIIIIEEEEEEEEEDDDDDDDDNNNNNNNNN

SEQ ID NO: 125 - protein, 3496 aa, Notothenia coriiceps
MMMMMMMMRRRRRRRRRRREEEEEEEEEIIIIIIIIVVVVVVVHHHHHHHHHHLLLLLLLLQQQQQQQQQAAAAAGGGGQQQQQQQQQCCCCCCGGGGNNNNNNNNQQQQQQQQQIIIIIIIIGGGGSSSSSSKKKKKKKKKFFFFFFFFFFFWWWWWWWWWWWWWWEEEEEEEEEVVVVVVVIIIIIIIISSSSSSDDDDDDDDEEEEEEEEEHHHHHHHHHHGGGGIIIIIIIIDDDDDDDDPPPPPPPTTTTTTTGGGGSSSSSSYYYYYYYYYYYYHHHHHHHHHHGGGGDDDDDDDDSSSSSSDDDDDDDDLLLLLLLLQQQQQQQQQLLLLLLLLDDDDDDDDRRRRRRRRRRRIIIIIIIINNNNNNNNVVVVVVVYYYYYYYYYYYYYYYYYYYYYYYYNNNNNNNNEEEEEEEEEAAAAASSSSSSGGGGGGGGKKKKKKKKKYYYYYYYYYYYYVVVVVVVPPPPPPPRRRRRRRRRRRAAAAAVVVVVVVLLLLLLLLVVVVVVVDDDDDDDDLLLLLLLLEEEEEEEEEPPPPPPPGGGGTTTTTTTMMMMMMMMDDDDDDDDSSSSSSVVVVVVVRRRRRRRRRRRSSSSSSGGGGPPPPPPPFFFFFFFFFFFGGGGQQQQQQQQQIIIIIIIIFFFFFFFFFFFRRRRRRRRRRRPPPPPPPDDDDDDDDNNNNNNNNFFFFFFFFFFFVVVVVVVFFFFFFFFFFFGGGGQQQQQQQQQSSSSSSGGGGAAAAAGGGGNNNNNNNNNNNNNNNNWWWWWWWWWWWWWWAAAAAKKKKKKKKKGGGGHHHHHHHHHHYYYYYYYYYYYYTTTTTTTEEEEEEEEEGGGGAAAAAEEEEEEEEELLLLLLLLVVVVVVVDDDDDDDDSSSSSSVVVVVVVLLLLLLLLDDDDDDDDVVVVVVVVVVVVVVRRRRRRRRRRRKKKKKKKKKEEEEEEEEEAAAAAEEEEEEEEEGGGGCCCCCCDDDDDDDDCCCCCCLLLLLLLLQQQQQQQQQGGGGFFFFFFFFFFFQQQQQQQQQLLLLLLLLTTTTTTTHHHHHHHHHHSSSSSSLLLLLLLLGGGGGGGGGGGGTTTTTTTGGGGSSSSSSGGGGMMMMMMMMGGGGTTTTTTTLLLLLLLLLLLLLLLLIIIIIIIISSSSSSKKKKKKKKKIIIIIIIIRRRRRRRRRRREEEEEEEEEEEEEEEEEEYYYYYYYYYYYYPPPPPPPDDDDDDDDRRRRRRRRRRRIIIIIIIIMMMMMMMMNNNNNNNNTTTTTTTFFFFFFFFFFFSSSSSSVVVVVVVVVVVVVVPPPPPPPSSSSSSPPPPPPPKKKKKKKKKVVVVVVVSSSSSSDDDDDDDDTTTTTTTVVVVVVVVVVVVVVEEEEEEEEEPPPPPPPYYYYYYYYYYYYNNNNNNNNAAAAATTTTTTTLLLLLLLLSSSSSSVVVVVVVHHHHHHHHHHQQQQQQQQQLLLLLLLLVVVVVVVEEEEEEEEENNNNNNNNTTTTTTTDDDDDDDDEEEEEEEEETTTTTTTFFFFFFFFFFFCCCCCCIIIIIIIIDDDDDDDDNNNNNNNNEEEEEEEEEAAAAALLLLLLLLYYYYYYYYYYYYDDDDDDDDIIIIIIIICCCCCCFFFFFFFFFFFRRRRRRRRRRRTTTTTTTLLLLLLLLKKKKKKKKKLLLLLLLLTTTTTTTTTTTTTTPPPPPPPTTTTTTTYYYYYYYYYYYYGGGGDDDDDDDDLLLLLLLLNNNNNNNNHHHHHHHHHHLLLLLLLLVVVVVVVSSSSSSAAAAATTTTTTTMMMMMMMMSSSSSSGGGGVVVVVVVTTTTTTTTTTTTTTCCCCCCLLLLLLLLRRRRRRRRRRRFFFFFFFFFFFPPPPPPPGGGGQQQQQQQQQLLLLLLLLNNNNNNNNAAAAADDDDDDDDLLLLLLLLRRRRRRRRRRRKKKKKKKKKLLLLLLLLAAAAAVVVVVVVNNNNNNNNMMMMMMMMVVVVVVVPPPPPPPFFFFFFFFFFFPPPPPPPRRRRRRRRRRRLLLLLLLLHHHHHHHHHHFFFFFFFFFFFFFFFFFFFFFFIIIIIIIIPPPPPPPGGGGFFFFFFFFFFFAAAAAPPPPPPPLLLLLLLLTTTTTTTSSSSSSRRRRRRRRRRRGGGGGGGGQQQQQQQQQQQQQQQQQQYYYYYYYYYYYYRRRRRRRRRRRSSSSSSLLLLLLLLTTTTTTTVVVVVVVPPPPPPPEEEEEEEEELLLLLLLLTTTTTTTQQQQQQQQQQQQQQQQQQMMMMMMMMFFFFFFFFFFFDDDDDDDDSSSSSSKKKKKKKKKNNNNNNNNMMMMMMMMMMMMMMMMAAAAAAAAAACCCCCCDDDDDDDDPPPPPPPRRRRRRRRRRRHHHHHHHHHHGGGGRRRRRRRRRRRYYYYYYYYYYYYLLLLLLLLTTTTTTTVVVVVVVAAAAAAAAAAIIIIIIIIFFFFFFFFFFFRRRRRRRRRRRGGGGRRRRRRRRRRRMMMMMMMMSSSSSSMMMMMMMMKKKKKKKKKEEEEEEEEEVVVVVVVDDDDDDDDEEEEEEEEEQQQQQQQQQMMMMMMMMLLLLLLLLNNNNNNNNAAAAAQQQQQQQQQNNNNNNNNKKKKKKKKKNNNNNNNNSSSSSSSSSSSSYYYYYYYYYYYYFFFFFFFFFFFVVVVVVVEEEEEEEEEWWWWWWWWWWWWWWIIIIIIIIPPPPPPPNNNNNNNNNNNNNNNNVVVVVVVKKKKKKKKKTTTTTTTAAAAAVVVVVVVCCCCCCDDDDDDDDIIIIIIIIPPPPPPPPPPPPPPRRRRRRRRRRRGGGGLLLLLLLLKKKKKKKKKMMMMMMMMAAAAAAAAAATTTTTTTFFFFFFFFFFFIIIIIIIIGGGGNNNNNNNNSSSSSSTTTTTTTAAAAAIIIIIIIIQQQQQQQQQEEEEEEEEELLLLLLLLFFFFFFFFFFFKKKKKKKKKRRRRRRRRRRRIIIIIIIISSSSSSEEEEEEEEEQQQQQQQQQFFFFFFFFFFFTTTTTTTAAAAAMMMMMMMMFFFFFFFFFFFRRRRRRRRRRRRRRRRRRRRRRKKKKKKKKKAAAAAFFFFFFFFFFFLLLLLLLLHHHHHHHHHHWWWWWWWWWWWWWWYYYYYYYYYYYYTTTTTTTGGGGEEEEEEEEEGGGGMMMMMMMMDDDDDDDDEEEEEEEEEMMMMMMMMEEEEEEEEEFFFFFFFFFFFTTTTTTTEEEEEEEEEAAAAAEEEEEEEEESSSSSSNNNNNNNNMMMMMMMMNNNNNNNNDDDDDDDDLLLLLLLLVVVVVVVSSSSSSEEEEEEEEEYYYYYYYYYYYYQQQQQQQQQQQQQQQQQQYYYYYYYYYYYYQQQQQQQQQDDDDDDDDAAAAATTTTTTTAAAAAEEEEEEEEEEEEEEEEEEEEEEEEEEEGGGGEEEEEEEEEFFFFFFFFFFFEEEEEEEEEEEEEEEEEEEEEEEEEEEGGGGEEEEEEEEEYYYYYYYYYYYYEEEEEEEEEDDDDDDDDGGGGAAAAAA

SEQ ID NO: 126 - protein, 3490 aa, Oryza sativa
MMMMMMMMRRRRRRRRRRREEEEEEEEEIIIIIIIILLLLLLLLHHHHHHHHHHIIIIIIIIQQQQQQQQQGGGGGGGGQQQQQQQQQCCCCCCGGGGNNNNNNNNQQQQQQQQQIIIIIIIIGGGGAAAAAKKKKKKKKKFFFFFFFFFFFWWWWWWWWWWWWWWEEEEEEEEEVVVVVVVIIIIIIIICCCCCCDDDDDDDDEEEEEEEEEHHHHHHHHHHGGGGVVVVVVVDDDDDDDDAAAAATTTTTTTGGGGRRRRRRRRRRRYYYYYYYYYYYYAAAAAGGGGDDDDDDDDSSSSSSDDDDDDDDLLLLLLLLQQQQQQQQQLLLLLLLLEEEEEEEEERRRRRRRRRRRIIIIIIIINNNNNNNNVVVVVVVYYYYYYYYYYYYYYYYYYYYYYYYNNNNNNNNEEEEEEEEEAAAAASSSSSSGGGGGGGGRRRRRRRRRRRYYYYYYYYYYYYVVVVVVVPPPPPPPRRRRRRRRRRRTTTTTTTVVVVVVVLLLLLLLLMMMMMMMMDDDDDDDDLLLLLLLLEEEEEEEEEPPPPPPPGGGGTTTTTTTMMMMMMMMDDDDDDDDSSSSSSVVVVVVVRRRRRRRRRRRSSSSSSGGGGPPPPPPPFFFFFFFFFFFGGGGQQQQQQQQQIIIIIIIIFFFFFFFFFFFRRRRRRRRRRRPPPPPPPDDDDDDDDNNNNNNNNFFFFFFFFFFFVVVVVVVFFFFFFFFFFFGGGGQQQQQQQQQSSSSSSGGGGAAAAAGGGGNNNNNNNNNNNNNNNNWWWWWWWWWWWWWWAAAAAKKKKKKKKKGGGGHHHHHHHHHHYYYYYYYYYYYYTTTTTTTEEEEEEEEEGGGGAAAAAEEEEEEEEELLLLLLLLIIIIIIIIDDDDDDDDSSSSSSVVVVVVVLLLLLLLLDDDDDDDDVVVVVVVVVVVVVVRRRRRRRRRRRKKKKKKKKKEEEEEEEEEAAAAAEEEEEEEEENNNNNNNNCCCCCCDDDDDDDDCCCCCCLLLLLLLLQQQQQQQQQGGGGFFFFFFFFFFFQQQQQQQQQVVVVVVVCCCCCCHHHHHHHHHHSSSSSSLLLLLLLLGGGGGGGGGGGGTTTTTTTGGGGSSSSSSGGGGMMMMMMMMGGGGTTTTTTTLLLLLLLLLLLLLLLLIIIIIIIISSSSSSKKKKKKKKKIIIIIIIIRRRRRRRRRRREEEEEEEEEEEEEEEEEEYYYYYYYYYYYYPPPPPPPDDDDDDDDRRRRRRRRRRRMMMMMMMMMMMMMMMMLLLLLLLLTTTTTTTFFFFFFFFFFFSSSSSSVVVVVVVFFFFFFFFFFFPPPPPPPSSSSSSPPPPPPPKKKKKKKKKVVVVVVVSSSSSSDDDDDDDDTTTTTTTVVVVVVVVVVVVVVEEEEEEEEEPPPPPPPYYYYYYYYYYYYNNNNNNNNAAAAATTTTTTTLLLLLLLLSSSSSSVVVVVVVHHHHHHHHHHQQQQQQQQQLLLLLLLLVVVVVVVEEEEEEEEENNNNNNNNAAAAADDDDDDDDEEEEEEEEECCCCCCMMMMMMMMVVVVVVVLLLLLLLLDDDDDDDDNNNNNNNNEEEEEEEEEAAAAALLLLLLLLYYYYYYYYYYYYDDDDDDDDIIIIIIIICCCCCCFFFFFFFFFFFRRRRRRRRRRRTTTTTTTLLLLLLLLKKKKKKKKKLLLLLLLLAAAAATTTTTTTPPPPPPPTTTTTTTFFFFFFFFFFFGGGGDDDDDDDDLLLLLLLLNNNNNNNNHHHHHHHHHHLLLLLLLLIIIIIIIISSSSSSAAAAATTTTTTTMMMMMMMMSSSSSSGGGGVVVVVVVTTTTTTTCCCCCCCCCCCCLLLLLLLLRRRRRRRRRRRFFFFFFFFFFFPPPPPPPGGGGQQQQQQQQQLLLLLLLLNNNNNNNNSSSSSSDDDDDDDDLLLLLLLLRRRRRRRRRRRKKKKKKKKKLLLLLLLLAAAAAVVVVVVVNNNNNNNNLLLLLLLLIIIIIIIIPPPPPPPFFFFFFFFFFFPPPPPPPRRRRRRRRRRRLLLLLLLLHHHHHHHHHHFFFFFFFFFFFFFFFFFFFFFFMMMMMMMMVVVVVVVGGGGFFFFFFFFFFFAAAAAPPPPPPPLLLLLLLLTTTTTTTSSSSSSRRRRRRRRRRRGGGGSSSSSSQQQQQQQQQQQQQQQQQQYYYYYYYYYYYYRRRRRRRRRRRAAAAALLLLLLLLTTTTTTTVVVVVVVPPPPPPPEEEEEEEEELLLLLLLLTTTTTTTQQQQQQQQQQQQQQQQQQMMMMMMMMWWWWWWWWWWWWWWDDDDDDDDAAAAAKKKKKKKKKNNNNNNNNMMMMMMMMMMMMMMMMCCCCCCAAAAAAAAAADDDDDDDDPPPPPPPRRRRRRRRRRRHHHHHHHHHHGGGGRRRRRRRRRRRYYYYYYYYYYYYLLLLLLLLTTTTTTTAAAAASSSSSSAAAAAMMMMMMMMFFFFFFFFFFFRRRRRRRRRRRGGGGKKKKKKKKKMMMMMMMMSSSSSSTTTTTTTKKKKKKKKKEEEEEEEEEVVVVVVVDDDDDDDDEEEEEEEEEQQQQQQQQQMMMMMMMMLLLLLLLLNNNNNNNNVVVVVVVQQQQQQQQQNNNNNNNNKKKKKKKKKNNNNNNNNSSSSSSSSSSSSYYYYYYYYYYYYFFFFFFFFFFFVVVVVVVEEEEEEEEEWWWWWWWWWWWWWWIIIIIIIIPPPPPPPNNNNNNNNNNNNNNNNVVVVVVVKKKKKKKKKSSSSSSSSSSSSVVVVVVVCCCCCCDDDDDDDDIIIIIIIIPPPPPPPPPPPPPPRRRRRRRRRRRGGGGLLLLLLLLKKKKKKKKKMMMMMMMMAAAAAAAAAATTTTTTTFFFFFFFFFFFVVVVVVVGGGGNNNNNNNNSSSSSSTTTTTTTSSSSSSIIIIIIIIQQQQQQQQQEEEEEEEEEMMMMMMMMFFFFFFFFFFFRRRRRRRRRRRRRRRRRRRRRRVVVVVVVSSSSSSEEEEEEEEEQQQQQQQQQFFFFFFFFFFFTTTTTTTAAAAAMMMMMMMMFFFFFFFFFFFRRRRRRRRRRRRRRRRRRRRRRKKKKKKKKKAAAAAFFFFFFFFFFFLLLLLLLLHHHHHHHHHHWWWWWWWWWWWWWWYYYYYYYYYYYYTTTTTTTGGGGEEEEEEEEEGGGGMMMMMMMMDDDDDDDDEEEEEEEEEMMMMMMMMEEEEEEEEEFFFFFFFFFFFTTTTTTTEEEEEEEEEAAAAAEEEEEEEEESSSSSSNNNNNNNNMMMMMMMMNNNNNNNNDDDDDDDDLLLLLLLLVVVVVVVAAAAAEEEEEEEEEYYYYYYYYYYYYQQQQQQQQQQQQQQQQQQYYYYYYYYYYYYQQQQQQQQQDDDDDDDDAAAAATTTTTTTAAAAADDDDDDDDEEEEEEEEEEEEEEEEEEYYYYYYYYYYYYEEEEEEEEEDDDDDDDDEEEEEEEEEEEEEEEEEEEEEEEEEEEEEEEEEEEEAAAAAEEEEEEEEEAAAAAEEEEEEEEEE

SEQ ID NO: 127 - protein, 3467 aa, Paramecium tetraurelia
MMMMMMMMRRRRRRRRRRREEEEEEEEEIIIIIIIIVVVVVVVHHHHHHHHHHIIIIIIIIQQQQQQQQQGGGGGGGGQQQQQQQQQCCCCCCGGGGNNNNNNNNQQQQQQQQQIIIIIIIIGGGGAAAAAKKKKKKKKKFFFFFFFFFFFWWWWWWWWWWWWWWEEEEEEEEEVVVVVVVIIIIIIIISSSSSSDDDDDDDDEEEEEEEEEHHHHHHHHHHGGGGIIIIIIIIDDDDDDDDPPPPPPPTTTTTTTGGGGTTTTTTTYYYYYYYYYYYYHHHHHHHHHHGGGGDDDDDDDDSSSSSSDDDDDDDDLLLLLLLLQQQQQQQQQLLLLLLLLEEEEEEEEERRRRRRRRRRRIIIIIIIINNNNNNNNVVVVVVVYYYYYYYYYYYYYYYYYYYYYYYYNNNNNNNNEEEEEEEEEAAAAATTTTTTTGGGGGGGGRRRRRRRRRRRYYYYYYYYYYYYVVVVVVVPPPPPPPRRRRRRRRRRRAAAAAIIIIIIIILLLLLLLLMMMMMMMMDDDDDDDDLLLLLLLLEEEEEEEEEPPPPPPPGGGGTTTTTTTMMMMMMMMDDDDDDDDSSSSSSVVVVVVVRRRRRRRRRRRAAAAAGGGGPPPPPPPFFFFFFFFFFFGGGGQQQQQQQQQLLLLLLLLFFFFFFFFFFFRRRRRRRRRRRPPPPPPPDDDDDDDDNNNNNNNNFFFFFFFFFFFVVVVVVVFFFFFFFFFFFGGGGQQQQQQQQQTTTTTTTGGGGAAAAAGGGGNNNNNNNNNNNNNNNNWWWWWWWWWWWWWWAAAAAKKKKKKKKKGGGGHHHHHHHHHHYYYYYYYYYYYYTTTTTTTEEEEEEEEEGGGGAAAAAEEEEEEEEELLLLLLLLIIIIIIIIDDDDDDDDSSSSSSVVVVVVVLLLLLLLLDDDDDDDDVVVVVVVVVVVVVVRRRRRRRRRRRKKKKKKKKKEEEEEEEEEAAAAAEEEEEEEEEGGGGCCCCCCDDDDDDDDCCCCCCLLLLLLLLQQQQQQQQQGGGGFFFFFFFFFFFQQQQQQQQQIIIIIIIITTTTTTTHHHHHHHHHHSSSSSSLLLLLLLLGGGGGGGGGGGGTTTTTTTGGGGSSSSSSGGGGMMMMMMMMGGGGTTTTTTTLLLLLLLLLLLLLLLLIIIIIIIISSSSSSKKKKKKKKKVVVVVVVRRRRRRRRRRREEEEEEEEEEEEEEEEEEYYYYYYYYYYYYPPPPPPPDDDDDDDDRRRRRRRRRRRIIIIIIIIMMMMMMMMEEEEEEEEETTTTTTTFFFFFFFFFFFSSSSSSVVVVVVVVVVVVVVPPPPPPPSSSSSSPPPPPPPKKKKKKKKKVVVVVVVSSSSSSDDDDDDDDTTTTTTTVVVVVVVVVVVVVVEEEEEEEEEPPPPPPPYYYYYYYYYYYYNNNNNNNNAAAAATTTTTTTLLLLLLLLSSSSSSVVVVVVVHHHHHHHHHHQQQQQQQQQLLLLLLLLVVVVVVVEEEEEEEEENNNNNNNNAAAAADDDDDDDDEEEEEEEEECCCCCCMMMMMMMMVVVVVVVIIIIIIIIDDDDDDDDNNNNNNNNEEEEEEEEEAAAAALLLLLLLLYYYYYYYYYYYYDDDDDDDDIIIIIIIICCCCCCFFFFFFFFFFFRRRRRRRRRRRTTTTTTTLLLLLLLLKKKKKKKKKLLLLLLLLTTTTTTTTTTTTTTPPPPPPPTTTTTTTYYYYYYYYYYYYGGGGDDDDDDDDLLLLLLLLNNNNNNNNHHHHHHHHHHLLLLLLLLVVVVVVVSSSSSSAAAAAAAAAAMMMMMMMMSSSSSSGGGGVVVVVVVTTTTTTTCCCCCCCCCCCCLLLLLLLLRRRRRRRRRRRFFFFFFFFFFFPPPPPPPGGGGQQQQQQQQQLLLLLLLLNNNNNNNNSSSSSSDDDDDDDDLLLLLLLLRRRRRRRRRRRKKKKKKKKKLLLLLLLLAAAAAVVVVVVVNNNNNNNNLLLLLLLLIIIIIIIIPPPPPPPFFFFFFFFFFFPPPPPPPRRRRRRRRRRRLLLLLLLLHHHHHHHHHHFFFFFFFFFFFFFFFFFFFFFFMMMMMMMMIIIIIIIIGGGGFFFFFFFFFFFAAAAAPPPPPPPLLLLLLLLTTTTTTTSSSSSSRRRRRRRRRRRGGGGSSSSSSQQQQQQQQQQQQQQQQQQYYYYYYYYYYYYRRRRRRRRRRRAAAAALLLLLLLLTTTTTTTVVVVVVVPPPPPPPEEEEEEEEELLLLLLLLTTTTTTTQQQQQQQQQQQQQQQQQQMMMMMMMMFFFFFFFFFFFDDDDDDDDAAAAAKKKKKKKKKNNNNNNNNMMMMMMMMMMMMMMMMCCCCCCAAAAAAAAAADDDDDDDDPPPPPPPRRRRRRRRRRRHHHHHHHHHHGGGGRRRRRRRRRRRYYYYYYYYYYYYLLLLLLLLTTTTTTTAAAAASSSSSSAAAAALLLLLLLLFFFFFFFFFFFRRRRRRRRRRRGGGGRRRRRRRRRRRMMMMMMMMSSSSSSTTTTTTTKKKKKKKKKEEEEEEEEEVVVVVVVDDDDDDDDEEEEEEEEEQQQQQQQQQMMMMMMMMLLLLLLLLNNNNNNNNVVVVVVVQQQQQQQQQNNNNNNNNKKKKKKKKKNNNNNNNNSSSSSSSSSSSSYYYYYYYYYYYYFFFFFFFFFFFVVVVVVVEEEEEEEEEWWWWWWWWWWWWWWIIIIIIIIPPPPPPPNNNNNNNNNNNNNNNNIIIIIIIIKKKKKKKKKSSSSSSSSSSSSIIIIIIIICCCCCCDDDDDDDDIIIIIIIIPPPPPPPPPPPPPPKKKKKKKKKGGGGLLLLLLLLKKKKKKKKKMMMMMMMMAAAAAVVVVVVVTTTTTTTFFFFFFFFFFFVVVVVVVGGGGNNNNNNNNSSSSSSTTTTTTTAAAAAIIIIIIIIQQQQQQQQQEEEEEEEEEMMMMMMMMFFFFFFFFFFFKKKKKKKKKRRRRRRRRRRRVVVVVVVAAAAAEEEEEEEEEQQQQQQQQQFFFFFFFFFFFTTTTTTTAAAAAMMMMMMMMFFFFFFFFFFFRRRRRRRRRRRRRRRRRRRRRRKKKKKKKKKAAAAAFFFFFFFFFFFLLLLLLLLHHHHHHHHHHWWWWWWWWWWWWWWYYYYYYYYYYYYTTTTTTTGGGGEEEEEEEEEGGGGMMMMMMMMDDDDDDDDEEEEEEEEEMMMMMMMMEEEEEEEEEFFFFFFFFFFFTTTTTTTEEEEEEEEEAAAAAEEEEEEEEESSSSSSNNNNNNNNMMMMMMMMNNNNNNNNDDDDDDDDLLLLLLLLVVVVVVVSSSSSSEEEEEEEEEYYYYYYYYYYYYQQQQQQQQQQQQQQQQQQYYYYYYYYYYYYQQQQQQQQQDDDDDDDDAAAAATTTTTTTAAAAAEEEEEEEEEEEEEEEEEEEEEEEEEEEGGGGEEEEEEEEEFFFFFFFFFFFEEEEEEEEEEEEEEEEEEEEEEEEEEEGGGGEEEEEEEEEQQQQQQQQQQ

SEQ ID NO: 128 - protein, 3541 aa, Pisum sativum
MMMMMMMMRRRRRRRRRRRQQQQQQQQQIIIIIIIILLLLLLLLHHHHHHHHHHIIIIIIIIQQQQQQQQQGGGGGGGGQQQQQQQQQCCCCCCGGGGNNNNNNNNQQQQQQQQQIIIIIIIIGGGGAAAAAKKKKKKKKKFFFFFFFFFFFWWWWWWWWWWWWWWEEEEEEEEEVVVVVVVVVVVVVVCCCCCCAAAAAEEEEEEEEEHHHHHHHHHHGGGGIIIIIIIIDDDDDDDDPPPPPPPTTTTTTTGGGGRRRRRRRRRRRYYYYYYYYYYYYTTTTTTTGGGGDDDDDDDDSSSSSSDDDDDDDDLLLLLLLLQQQQQQQQQLLLLLLLLEEEEEEEEERRRRRRRRRRRIIIIIIIIDDDDDDDDVVVVVVVYYYYYYYYYYYYYYYYYYYYYYYYNNNNNNNNEEEEEEEEEAAAAASSSSSSGGGGGGGGRRRRRRRRRRRFFFFFFFFFFFVVVVVVVPPPPPPPRRRRRRRRRRRAAAAAVVVVVVVLLLLLLLLMMMMMMMMDDDDDDDDLLLLLLLLEEEEEEEEEPPPPPPPGGGGTTTTTTTMMMMMMMMDDDDDDDDSSSSSSIIIIIIIIRRRRRRRRRRRSSSSSSGGGGPPPPPPPYYYYYYYYYYYYGGGGQQQQQQQQQIIIIIIIIFFFFFFFFFFFRRRRRRRRRRRPPPPPPPDDDDDDDDNNNNNNNNFFFFFFFFFFFVVVVVVVFFFFFFFFFFFGGGGQQQQQQQQQSSSSSSGGGGAAAAAGGGGNNNNNNNNNNNNNNNNWWWWWWWWWWWWWWAAAAAKKKKKKKKKGGGGHHHHHHHHHHYYYYYYYYYYYYTTTTTTTEEEEEEEEEGGGGAAAAAEEEEEEEEELLLLLLLLIIIIIIIIDDDDDDDDSSSSSSVVVVVVVLLLLLLLLDDDDDDDDVVVVVVVVVVVVVVRRRRRRRRRRRKKKKKKKKKEEEEEEEEEAAAAAEEEEEEEEENNNNNNNNCCCCCCDDDDDDDDCCCCCCLLLLLLLLQQQQQQQQQGGGGFFFFFFFFFFFQQQQQQQQQVVVVVVVCCCCCCHHHHHHHHHHSSSSSSLLLLLLLLGGGGGGGGGGGGTTTTTTTGGGGSSSSSSGGGGMMMMMMMMGGGGTTTTTTTLLLLLLLLLLLLLLLLIIIIIIIISSSSSSKKKKKKKKKIIIIIIIIRRRRRRRRRRREEEEEEEEEEEEEEEEEEYYYYYYYYYYYYPPPPPPPDDDDDDDDRRRRRRRRRRRMMMMMMMMMMMMMMMMLLLLLLLLTTTTTTTFFFFFFFFFFFSSSSSSVVVVVVVFFFFFFFFFFFPPPPPPPSSSSSSPPPPPPPKKKKKKKKKVVVVVVVSSSSSSDDDDDDDDTTTTTTTVVVVVVVVVVVVVVEEEEEEEEEPPPPPPPYYYYYYYYYYYYNNNNNNNNAAAAATTTTTTTLLLLLLLLSSSSSSVVVVVVVHHHHHHHHHHQQQQQQQQQLLLLLLLLVVVVVVVEEEEEEEEENNNNNNNNAAAAADDDDDDDDEEEEEEEEEVVVVVVVMMMMMMMMVVVVVVVLLLLLLLLDDDDDDDDNNNNNNNNEEEEEEEEEAAAAALLLLLLLLYYYYYYYYYYYYDDDDDDDDIIIIIIIICCCCCCFFFFFFFFFFFRRRRRRRRRRRIIIIIIIILLLLLLLLKKKKKKKKKLLLLLLLLSSSSSSNNNNNNNNPPPPPPPSSSSSSFFFFFFFFFFFGGGGDDDDDDDDLLLLLLLLNNNNNNNNHHHHHHHHHHLLLLLLLLIIIIIIIISSSSSSAAAAATTTTTTTMMMMMMMMSSSSSSGGGGVVVVVVVTTTTTTTCCCCCCCCCCCCLLLLLLLLRRRRRRRRRRRFFFFFFFFFFFPPPPPPPGGGGQQQQQQQQQLLLLLLLLNNNNNNNNSSSSSSDDDDDDDDLLLLLLLLRRRRRRRRRRRKKKKKKKKKLLLLLLLLAAAAAVVVVVVVNNNNNNNNLLLLLLLLIIIIIIIIPPPPPPPFFFFFFFFFFFPPPPPPPRRRRRRRRRRRLLLLLLLLHHHHHHHHHHFFFFFFFFFFFFFFFFFFFFFFMMMMMMMMVVVVVVVGGGGFFFFFFFFFFFAAAAAPPPPPPPLLLLLLLLTTTTTTTSSSSSSRRRRRRRRRRRGGGGSSSSSSQQQQQQQQQQQQQQQQQQYYYYYYYYYYYYRRRRRRRRRRRTTTTTTTLLLLLLLLSSSSSSVVVVVVVPPPPPPPEEEEEEEEELLLLLLLLTTTTTTTQQQQQQQQQQQQQQQQQQMMMMMMMMWWWWWWWWWWWWWWDDDDDDDDAAAAAKKKKKKKKKNNNNNNNNMMMMMMMMMMMMMMMMCCCCCCAAAAAAAAAADDDDDDDDPPPPPPPRRRRRRRRRRRHHHHHHHHHHGGGGRRRRRRRRRRRYYYYYYYYYYYYLLLLLLLLTTTTTTTAAAAASSSSSSAAAAAMMMMMMMMFFFFFFFFFFFRRRRRRRRRRRGGGGKKKKKKKKKMMMMMMMMSSSSSSTTTTTTTKKKKKKKKKEEEEEEEEEVVVVVVVDDDDDDDDEEEEEEEEEQQQQQQQQQMMMMMMMMMMMMMMMMNNNNNNNNVVVVVVVQQQQQQQQQNNNNNNNNKKKKKKKKKNNNNNNNNSSSSSSSSSSSSYYYYYYYYYYYYFFFFFFFFFFFVVVVVVVEEEEEEEEEWWWWWWWWWWWWWWIIIIIIIIPPPPPPPNNNNNNNNNNNNNNNNVVVVVVVKKKKKKKKKSSSSSSTTTTTTTVVVVVVVCCCCCCDDDDDDDDIIIIIIIIPPPPPPPPPPPPPPTTTTTTTGGGGLLLLLLLLKKKKKKKKKMMMMMMMMAAAAASSSSSSTTTTTTTFFFFFFFFFFFIIIIIIIIGGGGNNNNNNNNSSSSSSTTTTTTTSSSSSSIIIIIIIIQQQQQQQQQEEEEEEEEEMMMMMMMMFFFFFFFFFFFRRRRRRRRRRRRRRRRRRRRRRVVVVVVVSSSSSSEEEEEEEEEQQQQQQQQQFFFFFFFFFFFTTTTTTTAAAAAMMMMMMMMFFFFFFFFFFFRRRRRRRRRRRRRRRRRRRRRRKKKKKKKKKAAAAAFFFFFFFFFFFLLLLLLLLHHHHHHHHHHWWWWWWWWWWWWWWYYYYYYYYYYYYTTTTTTTGGGGEEEEEEEEEGGGGMMMMMMMMDDDDDDDDEEEEEEEEEMMMMMMMMEEEEEEEEEFFFFFFFFFFFTTTTTTTEEEEEEEEEAAAAAEEEEEEEEESSSSSSNNNNNNNNMMMMMMMMNNNNNNNNDDDDDDDDLLLLLLLLVVVVVVVAAAAAEEEEEEEEEYYYYYYYYYYYYQQQQQQQQQQQQQQQQQQYYYYYYYYYYYYQQQQQQQQQDDDDDDDDAAAAATTTTTTTAAAAADDDDDDDDEEEEEEEEEDDDDDDDDEEEEEEEEEYYYYYYYYYYYYGGGGEEEEEEEEEEEEEEEEEEEEEEEEEEEGGGGDDDDDDDDEEEEEEEEEEEEEEEEEEEEEEEEEEEYYYYYYYYYYYYGGGGQQQQQQQQQHHHHHHHHHHDDDDDDDDIIIIIIIII

SEQ ID NO: 129 - protein, 3657 aa, Physarum polycephalum
MMMMMMMMRRRRRRRRRRREEEEEEEEEIIIIIIIIVVVVVVVHHHHHHHHHHIIIIIIIIQQQQQQQQQAAAAAGGGGQQQQQQQQQCCCCCCGGGGNNNNNNNNQQQQQQQQQIIIIIIIIGGGGAAAAAKKKKKKKKKFFFFFFFFFFFWWWWWWWWWWWWWWEEEEEEEEEVVVVVVVIIIIIIIISSSSSSDDDDDDDDEEEEEEEEEHHHHHHHHHHGGGGIIIIIIIIDDDDDDDDPPPPPPPTTTTTTTGGGGSSSSSSYYYYYYYYYYYYHHHHHHHHHHGGGGEEEEEEEEESSSSSSDDDDDDDDLLLLLLLLQQQQQQQQQLLLLLLLLEEEEEEEEERRRRRRRRRRRIIIIIIIINNNNNNNNVVVVVVVYYYYYYYYYYYYYYYYYYYYYYYYNNNNNNNNEEEEEEEEEAAAAATTTTTTTGGGGGGGGKKKKKKKKKYYYYYYYYYYYYVVVVVVVPPPPPPPRRRRRRRRRRRAAAAAVVVVVVVLLLLLLLLVVVVVVVDDDDDDDDLLLLLLLLEEEEEEEEEPPPPPPPGGGGTTTTTTTMMMMMMMMDDDDDDDDSSSSSSVVVVVVVRRRRRRRRRRRAAAAAGGGGPPPPPPPFFFFFFFFFFFGGGGQQQQQQQQQIIIIIIIIFFFFFFFFFFFRRRRRRRRRRRPPPPPPPDDDDDDDDNNNNNNNNFFFFFFFFFFFVVVVVVVFFFFFFFFFFFGGGGQQQQQQQQQTTTTTTTGGGGAAAAAGGGGNNNNNNNNNNNNNNNNWWWWWWWWWWWWWWAAAAAKKKKKKKKKGGGGHHHHHHHHHHYYYYYYYYYYYYTTTTTTTEEEEEEEEEGGGGAAAAAEEEEEEEEELLLLLLLLIIIIIIIIDDDDDDDDSSSSSSVVVVVVVLLLLLLLLDDDDDDDDVVVVVVVVVVVVVVRRRRRRRRRRRKKKKKKKKKEEEEEEEEEAAAAAEEEEEEEEESSSSSSCCCCCCDDDDDDDDCCCCCCLLLLLLLLQQQQQQQQQGGGGFFFFFFFFFFFQQQQQQQQQIIIIIIIIAAAAAHHHHHHHHHHSSSSSSLLLLLLLLGGGGGGGGGGGGTTTTTTTGGGGSSSSSSGGGGMMMMMMMMGGGGTTTTTTTLLLLLLLLLLLLLLLLIIIIIIIISSSSSSKKKKKKKKKIIIIIIIIRRRRRRRRRRREEEEEEEEEEEEEEEEEEYYYYYYYYYYYYPPPPPPPDDDDDDDDRRRRRRRRRRRMMMMMMMMMMMMMMMMCCCCCCTTTTTTTFFFFFFFFFFFSSSSSSVVVVVVVVVVVVVVPPPPPPPSSSSSSPPPPPPPKKKKKKKKKVVVVVVVSSSSSSDDDDDDDDTTTTTTTVVVVVVVVVVVVVVEEEEEEEEEPPPPPPPYYYYYYYYYYYYNNNNNNNNAAAAATTTTTTTLLLLLLLLSSSSSSVVVVVVVHHHHHHHHHHQQQQQQQQQLLLLLLLLVVVVVVVEEEEEEEEENNNNNNNNAAAAADDDDDDDDEEEEEEEEEVVVVVVVMMMMMMMMCCCCCCIIIIIIIIDDDDDDDDNNNNNNNNEEEEEEEEEAAAAALLLLLLLLYYYYYYYYYYYYDDDDDDDDIIIIIIIISSSSSSFFFFFFFFFFFRRRRRRRRRRRTTTTTTTLLLLLLLLKKKKKKKKKLLLLLLLLTTTTTTTTTTTTTTPPPPPPPTTTTTTTYYYYYYYYYYYYGGGGDDDDDDDDLLLLLLLLNNNNNNNNHHHHHHHHHHLLLLLLLLVVVVVVVSSSSSSAAAAAVVVVVVVMMMMMMMMSSSSSSGGGGIIIIIIIITTTTTTTCCCCCCCCCCCCLLLLLLLLRRRRRRRRRRRFFFFFFFFFFFPPPPPPPGGGGQQQQQQQQQLLLLLLLLNNNNNNNNSSSSSSDDDDDDDDLLLLLLLLRRRRRRRRRRRKKKKKKKKKLLLLLLLLAAAAAVVVVVVVNNNNNNNNLLLLLLLLIIIIIIIIPPPPPPPFFFFFFFFFFFPPPPPPPRRRRRRRRRRRLLLLLLLLHHHHHHHHHHFFFFFFFFFFFFFFFFFFFFFFLLLLLLLLVVVVVVVGGGGFFFFFFFFFFFAAAAAPPPPPPPLLLLLLLLTTTTTTTSSSSSSRRRRRRRRRRRGGGGSSSSSSVVVVVVVGGGGYYYYYYYYYYYYRRRRRRRRRRRSSSSSSLLLLLLLLTTTTTTTVVVVVVVPPPPPPPEEEEEEEEELLLLLLLLTTTTTTTQQQQQQQQQQQQQQQQQQMMMMMMMMFFFFFFFFFFFDDDDDDDDAAAAAKKKKKKKKKNNNNNNNNMMMMMMMMMMMMMMMMAAAAAAAAAASSSSSSDDDDDDDDPPPPPPPRRRRRRRRRRRHHHHHHHHHHGGGGRRRRRRRRRRRYYYYYYYYYYYYLLLLLLLLTTTTTTTAAAAASSSSSSAAAAAMMMMMMMMFFFFFFFFFFFRRRRRRRRRRRGGGGRRRRRRRRRRRMMMMMMMMSSSSSSTTTTTTTKKKKKKKKKEEEEEEEEEVVVVVVVDDDDDDDDEEEEEEEEEQQQQQQQQQMMMMMMMMLLLLLLLLNNNNNNNNVVVVVVVQQQQQQQQQNNNNNNNNKKKKKKKKKNNNNNNNNSSSSSSSSSSSSYYYYYYYYYYYYFFFFFFFFFFFVVVVVVVEEEEEEEEEWWWWWWWWWWWWWWIIIIIIIIPPPPPPPNNNNNNNNNNNNNNNNIIIIIIIIKKKKKKKKKSSSSSSSSSSSSVVVVVVVCCCCCCDDDDDDDDIIIIIIIIPPPPPPPPPPPPPPKKKKKKKKKGGGGLLLLLLLLKKKKKKKKKMMMMMMMMAAAAAVVVVVVVTTTTTTTFFFFFFFFFFFIIIIIIIIGGGGNNNNNNNNSSSSSSTTTTTTTAAAAAIIIIIIIIQQQQQQQQQEEEEEEEEELLLLLLLLFFFFFFFFFFFKKKKKKKKKRRRRRRRRRRRVVVVVVVSSSSSSEEEEEEEEEQQQQQQQQQFFFFFFFFFFFTTTTTTTAAAAAMMMMMMMMFFFFFFFFFFFRRRRRRRRRRRRRRRRRRRRRRKKKKKKKKKAAAAAFFFFFFFFFFFLLLLLLLLHHHHHHHHHHWWWWWWWWWWWWWWYYYYYYYYYYYYTTTTTTTGGGGEEEEEEEEEGGGGMMMMMMMMDDDDDDDDEEEEEEEEEMMMMMMMMEEEEEEEEEFFFFFFFFFFFTTTTTTTEEEEEEEEEAAAAAEEEEEEEEESSSSSSNNNNNNNNMMMMMMMMNNNNNNNNDDDDDDDDLLLLLLLLVVVVVVVSSSSSSEEEEEEEEEYYYYYYYYYYYYQQQQQQQQQQQQQQQQQQYYYYYYYYYYYYQQQQQQQQQDDDDDDDDAAAAATTTTTTTIIIIIIIIDDDDDDDDDDDDDDDDEEEEEEEEEEEEEEEEEEGGGGGGGGEEEEEEEEEEEEEEEEEEEEEEEEEEEEEEEEEEEEGGGGGGGGAAAAAEEEEEEEEEEEEEEEEEEEEEEEEEEEAAAAARRRRRRRRRRRQQQQQQQQQRRRRRRRRRRRKKKKKKKKKHHHHHHHHHHYYYYYYYYYYYYVVVVVVVIIIIIIIIDDDDDDDDYYYYYYYYYYYYVVVVVVVPPPPPPPSSSSSSVVVVVVVCCCCCCVVVVVVVIIIIIIIILLLLLLLLIIIIIIIIRRRRRRRRRRRR

SEQ ID NO: 130 - protein, 3511 aa, Porphyra purpurea
MMMMMMMMRRRRRRRRRRREEEEEEEEEIIIIIIIIVVVVVVVHHHHHHHHHHIIIIIIIIQQQQQQQQQAAAAAGGGGQQQQQQQQQCCCCCCGGGGNNNNNNNNQQQQQQQQQIIIIIIIIGGGGAAAAAKKKKKKKKKFFFFFFFFFFFWWWWWWWWWWWWWWEEEEEEEEEVVVVVVVIIIIIIIISSSSSSEEEEEEEEEEEEEEEEEEHHHHHHHHHHGGGGIIIIIIIIDDDDDDDDSSSSSSSSSSSSGGGGAAAAAYYYYYYYYYYYYNNNNNNNNGGGGTTTTTTTSSSSSSDDDDDDDDLLLLLLLLQQQQQQQQQLLLLLLLLDDDDDDDDRRRRRRRRRRRAAAAAEEEEEEEEEVVVVVVVYYYYYYYYYYYYYYYYYYYYYYYYNNNNNNNNEEEEEEEEEGGGGSSSSSSGGGGGGGGRRRRRRRRRRRYYYYYYYYYYYYVVVVVVVPPPPPPPRRRRRRRRRRRAAAAAVVVVVVVLLLLLLLLVVVVVVVDDDDDDDDLLLLLLLLEEEEEEEEEPPPPPPPGGGGVVVVVVVLLLLLLLLDDDDDDDDTTTTTTTIIIIIIIIKKKKKKKKKAAAAAGGGGPPPPPPPHHHHHHHHHHGGGGGGGGLLLLLLLLYYYYYYYYYYYYRRRRRRRRRRRPPPPPPPDDDDDDDDNNNNNNNNFFFFFFFFFFFVVVVVVVAAAAAGGGGQQQQQQQQQSSSSSSGGGGAAAAAGGGGNNNNNNNNNNNNNNNNWWWWWWWWWWWWWWAAAAAKKKKKKKKKGGGGHHHHHHHHHHYYYYYYYYYYYYTTTTTTTEEEEEEEEEGGGGAAAAAEEEEEEEEELLLLLLLLVVVVVVVDDDDDDDDSSSSSSVVVVVVVLLLLLLLLDDDDDDDDVVVVVVVVVVVVVVRRRRRRRRRRRRRRRRRRRRRREEEEEEEEEAAAAAEEEEEEEEEGGGGCCCCCCDDDDDDDDCCCCCCLLLLLLLLQQQQQQQQQGGGGFFFFFFFFFFFQQQQQQQQQVVVVVVVTTTTTTTHHHHHHHHHHSSSSSSLLLLLLLLGGGGGGGGGGGGTTTTTTTGGGGSSSSSSGGGGMMMMMMMMGGGGTTTTTTTLLLLLLLLLLLLLLLLVVVVVVVSSSSSSKKKKKKKKKIIIIIIIIRRRRRRRRRRREEEEEEEEEEEEEEEEEEFFFFFFFFFFFPPPPPPPDDDDDDDDRRRRRRRRRRRMMMMMMMMMMMMMMMMCCCCCCTTTTTTTYYYYYYYYYYYYSSSSSSVVVVVVVMMMMMMMMPPPPPPPSSSSSSPPPPPPPKKKKKKKKKVVVVVVVSSSSSSDDDDDDDDTTTTTTTVVVVVVVVVVVVVVEEEEEEEEEPPPPPPPYYYYYYYYYYYYNNNNNNNNCCCCCCTTTTTTTLLLLLLLLSSSSSSVVVVVVVHHHHHHHHHHQQQQQQQQQLLLLLLLLVVVVVVVEEEEEEEEENNNNNNNNAAAAADDDDDDDDAAAAAVVVVVVVFFFFFFFFFFFCCCCCCIIIIIIIIDDDDDDDDNNNNNNNNEEEEEEEEEAAAAALLLLLLLLYYYYYYYYYYYYNNNNNNNNIIIIIIIICCCCCCYYYYYYYYYYYYNNNNNNNNTTTTTTTLLLLLLLLKKKKKKKKKKKKKKKKKKPPPPPPPEEEEEEEEEPPPPPPPAAAAAYYYYYYYYYYYYPPPPPPPDDDDDDDDLLLLLLLLNNNNNNNNKKKKKKKKKLLLLLLLLVVVVVVVSSSSSSGGGGVVVVVVVMMMMMMMMSSSSSSGGGGIIIIIIIITTTTTTTSSSSSSSSSSSSLLLLLLLLRRRRRRRRRRRFFFFFFFFFFFPPPPPPPGGGGQQQQQQQQQLLLLLLLLNNNNNNNNSSSSSSDDDDDDDDLLLLLLLLRRRRRRRRRRRKKKKKKKKKLLLLLLLLAAAAAVVVVVVVNNNNNNNNLLLLLLLLVVVVVVVPPPPPPPFFFFFFFFFFFPPPPPPPRRRRRRRRRRRLLLLLLLLHHHHHHHHHHFFFFFFFFFFFFFFFFFFFFFFMMMMMMMMIIIIIIIIGGGGYYYYYYYYYYYYAAAAAPPPPPPPLLLLLLLLSSSSSSAAAAADDDDDDDDGGGGVVVVVVVTTTTTTTAAAAAYYYYYYYYYYYYRRRRRRRRRRRAAAAAKKKKKKKKKTTTTTTTVVVVVVVAAAAADDDDDDDDLLLLLLLLTTTTTTTKKKKKKKKKQQQQQQQQQMMMMMMMMFFFFFFFFFFFDDDDDDDDPPPPPPPKKKKKKKKKNNNNNNNNMMMMMMMMMMMMMMMMAAAAADDDDDDDDCCCCCCDDDDDDDDPPPPPPPRRRRRRRRRRRNNNNNNNNGGGGRRRRRRRRRRRYYYYYYYYYYYYLLLLLLLLTTTTTTTAAAAASSSSSSAAAAAYYYYYYYYYYYYFFFFFFFFFFFRRRRRRRRRRRGGGGHHHHHHHHHHVVVVVVVSSSSSSTTTTTTTKKKKKKKKKEEEEEEEEEVVVVVVVEEEEEEEEEEEEEEEEEEQQQQQQQQQMMMMMMMMDDDDDDDDAAAAAIIIIIIIIQQQQQQQQQTTTTTTTKKKKKKKKKNNNNNNNNSSSSSSGGGGQQQQQQQQQFFFFFFFFFFFIIIIIIIIDDDDDDDDWWWWWWWWWWWWWWIIIIIIIIPPPPPPPNNNNNNNNAAAAAIIIIIIIIKKKKKKKKKAAAAASSSSSSVVVVVVVCCCCCCDDDDDDDDVVVVVVVAAAAAPPPPPPPTTTTTTTGGGGEEEEEEEEETTTTTTTMMMMMMMMSSSSSSAAAAAAAAAAFFFFFFFFFFFIIIIIIIIGGGGNNNNNNNNSSSSSSTTTTTTTAAAAAIIIIIIIIQQQQQQQQQDDDDDDDDIIIIIIIIFFFFFFFFFFFKKKKKKKKKRRRRRRRRRRRVVVVVVVGGGGSSSSSSHHHHHHHHHHFFFFFFFFFFFSSSSSSAAAAAMMMMMMMMFFFFFFFFFFFKKKKKKKKKRRRRRRRRRRRKKKKKKKKKAAAAAFFFFFFFFFFFLLLLLLLLHHHHHHHHHHWWWWWWWWWWWWWWYYYYYYYYYYYYTTTTTTTGGGGEEEEEEEEEGGGGMMMMMMMMDDDDDDDDEEEEEEEEEMMMMMMMMEEEEEEEEEFFFFFFFFFFFTTTTTTTEEEEEEEEEAAAAAEEEEEEEEESSSSSSNNNNNNNNMMMMMMMMNNNNNNNNDDDDDDDDLLLLLLLLVVVVVVVSSSSSSEEEEEEEEELLLLLLLLQQQQQQQQQQQQQQQQQQYYYYYYYYYYYYEEEEEEEEEAAAAAAAAAATTTTTTTVVVVVVVEEEEEEEEEGGGGEEEEEEEEEEEEEEEEEEEEEEEEEEEEEEEEEEEEDDDDDDDDAAAAAYYYYYYYYYYYYAAAAAEEEEEEEEEGGGGAAAAAVVVVVVVVVVVVVVNNNNNNNNGGGGDDDDDDDDQQQQQQQQQSSSSSSYYYYYYYYYYYYEEEEEEEEEDDDDDDDDQQQQQQQQQYYYYYYYYYYYYAAAAAAAAAAA

SEQ ID NO: 131 - protein, 3504 aa, Rattus norvegicus
MMMMMMMMRRRRRRRRRRREEEEEEEEEIIIIIIIIVVVVVVVHHHHHHHHHHIIIIIIIIQQQQQQQQQAAAAAGGGGQQQQQQQQQCCCCCCGGGGNNNNNNNNQQQQQQQQQIIIIIIIIGGGGPPPPPPPKKKKKKKKKFFFFFFFFFFFWWWWWWWWWWWWWWEEEEEEEEEVVVVVVVIIIIIIIISSSSSSDDDDDDDDEEEEEEEEEHHHHHHHHHHGGGGIIIIIIIIDDDDDDDDPPPPPPPTTTTTTTGGGGSSSSSSYYYYYYYYYYYYHHHHHHHHHHGGGGDDDDDDDDSSSSSSDDDDDDDDLLLLLLLLQQQQQQQQQLLLLLLLLEEEEEEEEERRRRRRRRRRRIIIIIIIINNNNNNNNVVVVVVVYYYYYYYYYYYYYYYYYYYYYYYYNNNNNNNNEEEEEEEEEAAAAAAAAAAGGGGNNNNNNNNKKKKKKKKKYYYYYYYYYYYYVVVVVVVPPPPPPPRRRRRRRRRRRAAAAAIIIIIIIILLLLLLLLVVVVVVVDDDDDDDDLLLLLLLLEEEEEEEEEPPPPPPPGGGGTTTTTTTMMMMMMMMDDDDDDDDSSSSSSVVVVVVVRRRRRRRRRRRSSSSSSGGGGPPPPPPPFFFFFFFFFFFGGGGQQQQQQQQQIIIIIIIIFFFFFFFFFFFRRRRRRRRRRRPPPPPPPDDDDDDDDNNNNNNNNFFFFFFFFFFFVVVVVVVFFFFFFFFFFFGGGGQQQQQQQQQSSSSSSGGGGAAAAAGGGGNNNNNNNNNNNNNNNNWWWWWWWWWWWWWWAAAAAKKKKKKKKKGGGGHHHHHHHHHHYYYYYYYYYYYYTTTTTTTEEEEEEEEEGGGGAAAAAEEEEEEEEELLLLLLLLVVVVVVVDDDDDDDDSSSSSSVVVVVVVLLLLLLLLDDDDDDDDVVVVVVVVVVVVVVRRRRRRRRRRRKKKKKKKKKEEEEEEEEESSSSSSEEEEEEEEESSSSSSCCCCCCDDDDDDDDCCCCCCLLLLLLLLQQQQQQQQQGGGGFFFFFFFFFFFQQQQQQQQQLLLLLLLLTTTTTTTHHHHHHHHHHSSSSSSLLLLLLLLGGGGGGGGGGGGTTTTTTTGGGGSSSSSSGGGGMMMMMMMMGGGGTTTTTTTLLLLLLLLLLLLLLLLIIIIIIIISSSSSSKKKKKKKKKIIIIIIIIRRRRRRRRRRREEEEEEEEEEEEEEEEEEYYYYYYYYYYYYPPPPPPPDDDDDDDDRRRRRRRRRRRIIIIIIIIMMMMMMMMNNNNNNNNTTTTTTTFFFFFFFFFFFSSSSSSVVVVVVVMMMMMMMMPPPPPPPSSSSSSPPPPPPPKKKKKKKKKVVVVVVVSSSSSSDDDDDDDDTTTTTTTVVVVVVVVVVVVVVEEEEEEEEEPPPPPPPYYYYYYYYYYYYNNNNNNNNAAAAATTTTTTTLLLLLLLLSSSSSSVVVVVVVHHHHHHHHHHQQQQQQQQQLLLLLLLLVVVVVVVEEEEEEEEENNNNNNNNTTTTTTTDDDDDDDDEEEEEEEEETTTTTTTYYYYYYYYYYYYCCCCCCIIIIIIIIDDDDDDDDNNNNNNNNEEEEEEEEEAAAAALLLLLLLLYYYYYYYYYYYYDDDDDDDDIIIIIIIICCCCCCFFFFFFFFFFFRRRRRRRRRRRTTTTTTTLLLLLLLLKKKKKKKKKLLLLLLLLTTTTTTTTTTTTTTPPPPPPPTTTTTTTYYYYYYYYYYYYGGGGDDDDDDDDLLLLLLLLNNNNNNNNHHHHHHHHHHLLLLLLLLVVVVVVVSSSSSSAAAAATTTTTTTMMMMMMMMSSSSSSGGGGVVVVVVVTTTTTTTTTTTTTTCCCCCCLLLLLLLLRRRRRRRRRRRFFFFFFFFFFFPPPPPPPGGGGQQQQQQQQQLLLLLLLLNNNNNNNNAAAAADDDDDDDDLLLLLLLLRRRRRRRRRRRKKKKKKKKKLLLLLLLLAAAAAVVVVVVVNNNNNNNNMMMMMMMMVVVVVVVPPPPPPPFFFFFFFFFFFPPPPPPPRRRRRRRRRRRLLLLLLLLHHHHHHHHHHFFFFFFFFFFFFFFFFFFFFFFMMMMMMMMPPPPPPPGGGGFFFFFFFFFFFAAAAAPPPPPPPLLLLLLLLTTTTTTTSSSSSSRRRRRRRRRRRGGGGSSSSSSQQQQQQQQQQQQQQQQQQYYYYYYYYYYYYRRRRRRRRRRRAAAAALLLLLLLLTTTTTTTVVVVVVVPPPPPPPEEEEEEEEELLLLLLLLTTTTTTTQQQQQQQQQQQQQQQQQQMMMMMMMMFFFFFFFFFFFDDDDDDDDSSSSSSKKKKKKKKKNNNNNNNNMMMMMMMMMMMMMMMMAAAAAAAAAACCCCCCDDDDDDDDPPPPPPPRRRRRRRRRRRHHHHHHHHHHGGGGRRRRRRRRRRRYYYYYYYYYYYYLLLLLLLLTTTTTTTVVVVVVVAAAAAAAAAAIIIIIIIIFFFFFFFFFFFRRRRRRRRRRRGGGGRRRRRRRRRRRMMMMMMMMSSSSSSMMMMMMMMKKKKKKKKKEEEEEEEEEVVVVVVVDDDDDDDDEEEEEEEEEQQQQQQQQQMMMMMMMMLLLLLLLLNNNNNNNNVVVVVVVQQQQQQQQQNNNNNNNNKKKKKKKKKNNNNNNNNSSSSSSSSSSSSYYYYYYYYYYYYFFFFFFFFFFFVVVVVVVEEEEEEEEEWWWWWWWWWWWWWWIIIIIIIIPPPPPPPNNNNNNNNNNNNNNNNVVVVVVVKKKKKKKKKTTTTTTTAAAAAVVVVVVVCCCCCCDDDDDDDDIIIIIIIIPPPPPPPPPPPPPPRRRRRRRRRRRGGGGLLLLLLLLKKKKKKKKKMMMMMMMMSSSSSSAAAAATTTTTTTFFFFFFFFFFFIIIIIIIIGGGGNNNNNNNNSSSSSSTTTTTTTAAAAAIIIIIIIIQQQQQQQQQEEEEEEEEELLLLLLLLFFFFFFFFFFFKKKKKKKKKRRRRRRRRRRRIIIIIIIISSSSSSEEEEEEEEEQQQQQQQQQFFFFFFFFFFFTTTTTTTAAAAAMMMMMMMMFFFFFFFFFFFRRRRRRRRRRRRRRRRRRRRRRKKKKKKKKKAAAAAFFFFFFFFFFFLLLLLLLLHHHHHHHHHHWWWWWWWWWWWWWWYYYYYYYYYYYYTTTTTTTGGGGEEEEEEEEEGGGGMMMMMMMMDDDDDDDDEEEEEEEEEMMMMMMMMEEEEEEEEEFFFFFFFFFFFTTTTTTTEEEEEEEEEAAAAAEEEEEEEEESSSSSSNNNNNNNNMMMMMMMMNNNNNNNNEEEEEEEEELLLLLLLLVVVVVVVSSSSSSEEEEEEEEEYYYYYYYYYYYYQQQQQQQQQQQQQQQQQQYYYYYYYYYYYYQQQQQQQQQDDDDDDDDAAAAATTTTTTTAAAAADDDDDDDDEEEEEEEEEQQQQQQQQQGGGGEEEEEEEEEFFFFFFFFFFFEEEEEEEEEEEEEEEEEEEEEEEEEEEEEEEEEEEEGGGGEEEEEEEEEDDDDDDDDEEEEEEEEEAAAAAA

SEQ ID NO: 132 - protein, 3534 aa, Solanum tuberosum
MMMMMMMMRRRRRRRRRRREEEEEEEEEIIIIIIIILLLLLLLLHHHHHHHHHHIIIIIIIIQQQQQQQQQGGGGGGGGQQQQQQQQQCCCCCCGGGGNNNNNNNNQQQQQQQQQIIIIIIIIGGGGSSSSSSKKKKKKKKKFFFFFFFFFFFWWWWWWWWWWWWWWEEEEEEEEEVVVVVVVIIIIIIIICCCCCCDDDDDDDDEEEEEEEEEHHHHHHHHHHGGGGVVVVVVVDDDDDDDDPPPPPPPTTTTTTTGGGGRRRRRRRRRRRYYYYYYYYYYYYKKKKKKKKKGGGGTTTTTTTAAAAAAAAAAEEEEEEEEESSSSSSDDDDDDDDLLLLLLLLQQQQQQQQQLLLLLLLLEEEEEEEEERRRRRRRRRRRIIIIIIIINNNNNNNNVVVVVVVYYYYYYYYYYYYFFFFFFFFFFFNNNNNNNNEEEEEEEEEAAAAASSSSSSGGGGGGGGRRRRRRRRRRRYYYYYYYYYYYYVVVVVVVPPPPPPPRRRRRRRRRRRAAAAAVVVVVVVLLLLLLLLMMMMMMMMDDDDDDDDLLLLLLLLEEEEEEEEEPPPPPPPGGGGTTTTTTTMMMMMMMMDDDDDDDDSSSSSSIIIIIIIIRRRRRRRRRRRSSSSSSGGGGPPPPPPPYYYYYYYYYYYYGGGGQQQQQQQQQIIIIIIIIFFFFFFFFFFFRRRRRRRRRRRPPPPPPPDDDDDDDDNNNNNNNNLLLLLLLLVVVVVVVFFFFFFFFFFFGGGGQQQQQQQQQSSSSSSGGGGAAAAAGGGGNNNNNNNNNNNNNNNNWWWWWWWWWWWWWWAAAAAKKKKKKKKKGGGGHHHHHHHHHHYYYYYYYYYYYYTTTTTTTEEEEEEEEEGGGGAAAAAEEEEEEEEELLLLLLLLIIIIIIIIDDDDDDDDAAAAAVVVVVVVLLLLLLLLDDDDDDDDVVVVVVVVVVVVVVRRRRRRRRRRRKKKKKKKKKEEEEEEEEEAAAAAEEEEEEEEENNNNNNNNCCCCCCDDDDDDDDCCCCCCLLLLLLLLQQQQQQQQQGGGGFFFFFFFFFFFQQQQQQQQQVVVVVVVCCCCCCHHHHHHHHHHSSSSSSLLLLLLLLGGGGGGGGGGGGTTTTTTTGGGGSSSSSSGGGGMMMMMMMMGGGGTTTTTTTLLLLLLLLLLLLLLLLIIIIIIIISSSSSSKKKKKKKKKVVVVVVVRRRRRRRRRRREEEEEEEEEEEEEEEEEEYYYYYYYYYYYYPPPPPPPDDDDDDDDRRRRRRRRRRRMMMMMMMMMMMMMMMMLLLLLLLLTTTTTTTFFFFFFFFFFFSSSSSSVVVVVVVFFFFFFFFFFFPPPPPPPSSSSSSPPPPPPPKKKKKKKKKVVVVVVVSSSSSSDDDDDDDDTTTTTTTVVVVVVVVVVVVVVEEEEEEEEEPPPPPPPYYYYYYYYYYYYNNNNNNNNAAAAATTTTTTTLLLLLLLLSSSSSSVVVVVVVHHHHHHHHHHQQQQQQQQQLLLLLLLLVVVVVVVEEEEEEEEENNNNNNNNAAAAADDDDDDDDEEEEEEEEECCCCCCMMMMMMMMVVVVVVVLLLLLLLLDDDDDDDDNNNNNNNNEEEEEEEEEAAAAALLLLLLLLYYYYYYYYYYYYDDDDDDDDIIIIIIIICCCCCCFFFFFFFFFFFRRRRRRRRRRRTTTTTTTLLLLLLLLKKKKKKKKKLLLLLLLLTTTTTTTTTTTTTTPPPPPPPSSSSSSFFFFFFFFFFFGGGGDDDDDDDDLLLLLLLLNNNNNNNNHHHHHHHHHHLLLLLLLLIIIIIIIISSSSSSAAAAATTTTTTTMMMMMMMMSSSSSSGGGGVVVVVVVTTTTTTTCCCCCCCCCCCCLLLLLLLLRRRRRRRRRRRFFFFFFFFFFFPPPPPPPGGGGQQQQQQQQQLLLLLLLLNNNNNNNNSSSSSSDDDDDDDDLLLLLLLLRRRRRRRRRRRKKKKKKKKKLLLLLLLLAAAAAVVVVVVVNNNNNNNNLLLLLLLLIIIIIIIIPPPPPPPLLLLLLLLPPPPPPPRRRRRRRRRRRLLLLLLLLHHHHHHHHHHFFFFFFFFFFFFFFFFFFFFFFMMMMMMMMVVVVVVVGGGGFFFFFFFFFFFAAAAAPPPPPPPLLLLLLLLTTTTTTTSSSSSSRRRRRRRRRRRGGGGSSSSSSQQQQQQQQQQQQQQQQQQYYYYYYYYYYYYIIIIIIIISSSSSSLLLLLLLLTTTTTTTVVVVVVVPPPPPPPEEEEEEEEELLLLLLLLTTTTTTTQQQQQQQQQQQQQQQQQQMMMMMMMMWWWWWWWWWWWWWWDDDDDDDDAAAAAKKKKKKKKKNNNNNNNNMMMMMMMMMMMMMMMMCCCCCCAAAAAAAAAADDDDDDDDPPPPPPPRRRRRRRRRRRHHHHHHHHHHGGGGRRRRRRRRRRRYYYYYYYYYYYYLLLLLLLLTTTTTTTAAAAASSSSSSAAAAAMMMMMMMMFFFFFFFFFFFRRRRRRRRRRRGGGGKKKKKKKKKMMMMMMMMSSSSSSTTTTTTTKKKKKKKKKEEEEEEEEEVVVVVVVDDDDDDDDEEEEEEEEEQQQQQQQQQMMMMMMMMIIIIIIIINNNNNNNNVVVVVVVQQQQQQQQQNNNNNNNNKKKKKKKKKNNNNNNNNSSSSSSSSSSSSYYYYYYYYYYYYFFFFFFFFFFFVVVVVVVEEEEEEEEEWWWWWWWWWWWWWWIIIIIIIIPPPPPPPNNNNNNNNNNNNNNNNVVVVVVVKKKKKKKKKSSSSSSSSSSSSVVVVVVVCCCCCCDDDDDDDDIIIIIIIIPPPPPPPPPPPPPPTTTTTTTGGGGLLLLLLLLKKKKKKKKKMMMMMMMMAAAAASSSSSSTTTTTTTFFFFFFFFFFFVVVVVVVGGGGNNNNNNNNSSSSSSTTTTTTTSSSSSSIIIIIIIIQQQQQQQQQEEEEEEEEEMMMMMMMMFFFFFFFFFFFRRRRRRRRRRRRRRRRRRRRRRVVVVVVVSSSSSSEEEEEEEEEQQQQQQQQQFFFFFFFFFFFTTTTTTTAAAAAMMMMMMMMFFFFFFFFFFFRRRRRRRRRRRRRRRRRRRRRRKKKKKKKKKAAAAAFFFFFFFFFFFLLLLLLLLHHHHHHHHHHWWWWWWWWWWWWWWYYYYYYYYYYYYTTTTTTTGGGGEEEEEEEEEGGGGMMMMMMMMDDDDDDDDEEEEEEEEEMMMMMMMMEEEEEEEEEFFFFFFFFFFFTTTTTTTEEEEEEEEEAAAAAEEEEEEEEESSSSSSNNNNNNNNMMMMMMMMNNNNNNNNDDDDDDDDPPPPPPPVVVVVVVAAAAAEEEEEEEEEYYYYYYYYYYYYQQQQQQQQQQQQQQQQQQYYYYYYYYYYYYQQQQQQQQQDDDDDDDDAAAAATTTTTTTAAAAADDDDDDDDDDDDDDDDEEEEEEEEEEEEEEEEEEEEEEEEEEEYYYYYYYYYYYYDDDDDDDDDDDDDDDDEEEEEEEEEAAAAAAAAAADDDDDDDDDDDDDDDDHHHHHHHHHHQQQQQQQQQYYYYYYYYYYYYEEEEEEEEESSSSSSS

SEQ ID NO: 133 - protein, 3497 aa, Glycine max
MMMMMMMMRRRRRRRRRRREEEEEEEEEIIIIIIIILLLLLLLLHHHHHHHHHHVVVVVVVQQQQQQQQQAAAAAGGGGQQQQQQQQQCCCCCCGGGGNNNNNNNNQQQQQQQQQIIIIIIIIGGGGGGGGKKKKKKKKKFFFFFFFFFFFWWWWWWWWWWWWWWEEEEEEEEEVVVVVVVMMMMMMMMCCCCCCDDDDDDDDEEEEEEEEEHHHHHHHHHHGGGGIIIIIIIIDDDDDDDDAAAAATTTTTTTGGGGNNNNNNNNYYYYYYYYYYYYVVVVVVVGGGGNNNNNNNNFFFFFFFFFFFHHHHHHHHHHLLLLLLLLQQQQQQQQQLLLLLLLLEEEEEEEEERRRRRRRRRRRVVVVVVVNNNNNNNNVVVVVVVYYYYYYYYYYYYYYYYYYYYYYYYNNNNNNNNEEEEEEEEEAAAAASSSSSSGGGGGGGGRRRRRRRRRRRYYYYYYYYYYYYVVVVVVVPPPPPPPRRRRRRRRRRRAAAAAVVVVVVVLLLLLLLLMMMMMMMMDDDDDDDDLLLLLLLLEEEEEEEEEPPPPPPPGGGGTTTTTTTMMMMMMMMDDDDDDDDSSSSSSLLLLLLLLRRRRRRRRRRRSSSSSSGGGGPPPPPPPFFFFFFFFFFFGGGGKKKKKKKKKIIIIIIIIFFFFFFFFFFFRRRRRRRRRRRPPPPPPPDDDDDDDDNNNNNNNNFFFFFFFFFFFVVVVVVVFFFFFFFFFFFGGGGQQQQQQQQQNNNNNNNNGGGGAAAAAGGGGNNNNNNNNNNNNNNNNWWWWWWWWWWWWWWAAAAAKKKKKKKKKGGGGHHHHHHHHHHYYYYYYYYYYYYTTTTTTTEEEEEEEEEGGGGAAAAAEEEEEEEEELLLLLLLLIIIIIIIIDDDDDDDDSSSSSSVVVVVVVLLLLLLLLDDDDDDDDVVVVVVVVVVVVVVRRRRRRRRRRRKKKKKKKKKEEEEEEEEEAAAAAEEEEEEEEENNNNNNNNCCCCCCDDDDDDDDCCCCCCLLLLLLLLQQQQQQQQQGGGGFFFFFFFFFFFQQQQQQQQQIIIIIIIICCCCCCHHHHHHHHHHSSSSSSLLLLLLLLGGGGGGGGGGGGTTTTTTTGGGGSSSSSSGGGGMMMMMMMMGGGGTTTTTTTLLLLLLLLLLLLLLLLIIIIIIIISSSSSSKKKKKKKKKIIIIIIIIRRRRRRRRRRREEEEEEEEEEEEEEEEEEYYYYYYYYYYYYPPPPPPPDDDDDDDDRRRRRRRRRRRMMMMMMMMMMMMMMMMLLLLLLLLTTTTTTTFFFFFFFFFFFSSSSSSVVVVVVVFFFFFFFFFFFAAAAAVVVVVVVPPPPPPPEEEEEEEEEGGGGSSSSSSDDDDDDDDTTTTTTTVVVVVVVVVVVVVVEEEEEEEEEPPPPPPPYYYYYYYYYYYYNNNNNNNNAAAAATTTTTTTLLLLLLLLSSSSSSVVVVVVVHHHHHHHHHHQQQQQQQQQLLLLLLLLVVVVVVVEEEEEEEEENNNNNNNNAAAAADDDDDDDDEEEEEEEEECCCCCCMMMMMMMMVVVVVVVLLLLLLLLDDDDDDDDNNNNNNNNEEEEEEEEEAAAAALLLLLLLLYYYYYYYYYYYYDDDDDDDDIIIIIIIICCCCCCFFFFFFFFFFFRRRRRRRRRRRTTTTTTTLLLLLLLLKKKKKKKKKLLLLLLLLTTTTTTTNNNNNNNNPPPPPPPSSSSSSFFFFFFFFFFFGGGGDDDDDDDDLLLLLLLLNNNNNNNNHHHHHHHHHHLLLLLLLLIIIIIIIISSSSSSTTTTTTTTTTTTTTMMMMMMMMSSSSSSGGGGVVVVVVVTTTTTTTCCCCCCCCCCCCLLLLLLLLRRRRRRRRRRRFFFFFFFFFFFPPPPPPPGGGGQQQQQQQQQLLLLLLLLNNNNNNNNSSSSSSDDDDDDDDLLLLLLLLRRRRRRRRRRRKKKKKKKKKLLLLLLLLAAAAAVVVVVVVNNNNNNNNLLLLLLLLIIIIIIIIPPPPPPPFFFFFFFFFFFPPPPPPPRRRRRRRRRRRLLLLLLLLHHHHHHHHHHFFFFFFFFFFFFFFFFFFFFFFMMMMMMMMVVVVVVVGGGGFFFFFFFFFFFAAAAAPPPPPPPLLLLLLLLTTTTTTTSSSSSSRRRRRRRRRRRGGGGSSSSSSQQQQQQQQQQQQQQQQQQYYYYYYYYYYYYRRRRRRRRRRRSSSSSSLLLLLLLLTTTTTTTIIIIIIIIPPPPPPPEEEEEEEEELLLLLLLLTTTTTTTQQQQQQQQQQQQQQQQQQMMMMMMMMWWWWWWWWWWWWWWDDDDDDDDAAAAARRRRRRRRRRRNNNNNNNNMMMMMMMMMMMMMMMMCCCCCCAAAAAAAAAADDDDDDDDPPPPPPPRRRRRRRRRRRHHHHHHHHHHGGGGRRRRRRRRRRRYYYYYYYYYYYYLLLLLLLLTTTTTTTAAAAASSSSSSAAAAAMMMMMMMMFFFFFFFFFFFRRRRRRRRRRRGGGGKKKKKKKKKMMMMMMMMSSSSSSTTTTTTTKKKKKKKKKEEEEEEEEEVVVVVVVDDDDDDDDQQQQQQQQQQQQQQQQQQMMMMMMMMIIIIIIIINNNNNNNNVVVVVVVQQQQQQQQQNNNNNNNNKKKKKKKKKNNNNNNNNSSSSSSSSSSSSYYYYYYYYYYYYFFFFFFFFFFFVVVVVVVEEEEEEEEEWWWWWWWWWWWWWWIIIIIIIIPPPPPPPNNNNNNNNNNNNNNNNVVVVVVVKKKKKKKKKSSSSSSSSSSSSVVVVVVVCCCCCCDDDDDDDDIIIIIIIIPPPPPPPPPPPPPPTTTTTTTGGGGLLLLLLLLSSSSSSMMMMMMMMSSSSSSSSSSSSTTTTTTTFFFFFFFFFFFMMMMMMMMGGGGNNNNNNNNSSSSSSTTTTTTTSSSSSSIIIIIIIIQQQQQQQQQEEEEEEEEEMMMMMMMMFFFFFFFFFFFRRRRRRRRRRRRRRRRRRRRRRVVVVVVVSSSSSSEEEEEEEEEQQQQQQQQQFFFFFFFFFFFTTTTTTTVVVVVVVMMMMMMMMFFFFFFFFFFFKKKKKKKKKRRRRRRRRRRRKKKKKKKKKAAAAAFFFFFFFFFFFLLLLLLLLHHHHHHHHHHWWWWWWWWWWWWWWYYYYYYYYYYYYTTTTTTTGGGGEEEEEEEEEGGGGMMMMMMMMDDDDDDDDEEEEEEEEEMMMMMMMMEEEEEEEEEFFFFFFFFFFFTTTTTTTEEEEEEEEEVVVVVVVRRRRRRRRRRRAAAAANNNNNNNNMMMMMMMMNNNNNNNNDDDDDDDDLLLLLLLLVVVVVVVAAAAAEEEEEEEEEYYYYYYYYYYYYQQQQQQQQQQQQQQQQQQYYYYYYYYYYYYQQQQQQQQQDDDDDDDDAAAAATTTTTTTAAAAAVVVVVVVDDDDDDDDDDDDDDDDHHHHHHHHHHEEEEEEEEEDDDDDDDDEEEEEEEEEDDDDDDDDEEEEEEEEEDDDDDDDDEEEEEEEEEAAAAAMMMMMMMMAAAAAAAAAAA

SEQ ID NO: 134 - protein, 3478 aa, Trichoderma viride
MMMMMMMMRRRRRRRRRRREEEEEEEEEIIIIIIIIVVVVVVVSSSSSSVVVVVVVHHHHHHHHHHLLLLLLLLQQQQQQQQQTTTTTTTGGGGQQQQQQQQQCCCCCCGGGGNNNNNNNNQQQQQQQQQVVVVVVVGGGGSSSSSSAAAAAFFFFFFFFFFFWWWWWWWWWWWWWWQQQQQQQQQTTTTTTTIIIIIIIISSSSSSGGGGEEEEEEEEEHHHHHHHHHHGGGGLLLLLLLLDDDDDDDDSSSSSSSSSSSSGGGGVVVVVVVYYYYYYYYYYYYGGGGGGGGTTTTTTTSSSSSSDDDDDDDDQQQQQQQQQQQQQQQQQQLLLLLLLLDDDDDDDDRRRRRRRRRRRLLLLLLLLNNNNNNNNVVVVVVVYYYYYYYYYYYYFFFFFFFFFFFNNNNNNNNEEEEEEEEEAAAAASSSSSSNNNNNNNNNNNNNNNNKKKKKKKKKYYYYYYYYYYYYVVVVVVVPPPPPPPRRRRRRRRRRRAAAAAVVVVVVVLLLLLLLLVVVVVVVDDDDDDDDLLLLLLLLEEEEEEEEEPPPPPPPGGGGTTTTTTTMMMMMMMMDDDDDDDDAAAAAVVVVVVVRRRRRRRRRRRSSSSSSGGGGPPPPPPPFFFFFFFFFFFGGGGQQQQQQQQQLLLLLLLLFFFFFFFFFFFRRRRRRRRRRRPPPPPPPDDDDDDDDNNNNNNNNFFFFFFFFFFFVVVVVVVFFFFFFFFFFFGGGGQQQQQQQQQSSSSSSGGGGAAAAAGGGGNNNNNNNNNNNNNNNNWWWWWWWWWWWWWWAAAAAKKKKKKKKKGGGGHHHHHHHHHHYYYYYYYYYYYYTTTTTTTEEEEEEEEEGGGGAAAAAEEEEEEEEELLLLLLLLVVVVVVVDDDDDDDDQQQQQQQQQVVVVVVVLLLLLLLLDDDDDDDDVVVVVVVVVVVVVVRRRRRRRRRRRRRRRRRRRRRREEEEEEEEEAAAAAEEEEEEEEENNNNNNNNCCCCCCEEEEEEEEECCCCCCLLLLLLLLQQQQQQQQQGGGGFFFFFFFFFFFQQQQQQQQQIIIIIIIITTTTTTTHHHHHHHHHHSSSSSSLLLLLLLLGGGGGGGGGGGGTTTTTTTGGGGSSSSSSGGGGMMMMMMMMGGGGTTTTTTTLLLLLLLLLLLLLLLLIIIIIIIISSSSSSKKKKKKKKKIIIIIIIIRRRRRRRRRRREEEEEEEEEEEEEEEEEEFFFFFFFFFFFPPPPPPPDDDDDDDDRRRRRRRRRRRMMMMMMMMMMMMMMMMAAAAATTTTTTTFFFFFFFFFFFSSSSSSVVVVVVVVVVVVVVPPPPPPPSSSSSSPPPPPPPKKKKKKKKKVVVVVVVSSSSSSDDDDDDDDTTTTTTTVVVVVVVVVVVVVVEEEEEEEEEPPPPPPPYYYYYYYYYYYYNNNNNNNNAAAAATTTTTTTLLLLLLLLSSSSSSMMMMMMMMHHHHHHHHHHQQQQQQQQQLLLLLLLLVVVVVVVEEEEEEEEENNNNNNNNSSSSSSDDDDDDDDKKKKKKKKKTTTTTTTFFFFFFFFFFFCCCCCCIIIIIIIIDDDDDDDDNNNNNNNNEEEEEEEEEAAAAALLLLLLLLYYYYYYYYYYYYDDDDDDDDIIIIIIIICCCCCCMMMMMMMMRRRRRRRRRRRTTTTTTTLLLLLLLLKKKKKKKKKLLLLLLLLSSSSSSNNNNNNNNPPPPPPPSSSSSSYYYYYYYYYYYYGGGGDDDDDDDDLLLLLLLLNNNNNNNNHHHHHHHHHHLLLLLLLLVVVVVVVSSSSSSAAAAAVVVVVVVMMMMMMMMSSSSSSGGGGVVVVVVVSSSSSSTTTTTTTSSSSSSLLLLLLLLRRRRRRRRRRRFFFFFFFFFFFPPPPPPPGGGGQQQQQQQQQLLLLLLLLNNNNNNNNSSSSSSDDDDDDDDLLLLLLLLRRRRRRRRRRRKKKKKKKKKLLLLLLLLAAAAAVVVVVVVNNNNNNNNMMMMMMMMVVVVVVVPPPPPPPFFFFFFFFFFFPPPPPPPRRRRRRRRRRRLLLLLLLLHHHHHHHHHHFFFFFFFFFFFFFFFFFFFFFFMMMMMMMMVVVVVVVGGGGFFFFFFFFFFFAAAAAPPPPPPPLLLLLLLLTTTTTTTSSSSSSPPPPPPPGGGGAAAAAHHHHHHHHHHSSSSSSFFFFFFFFFFFRRRRRRRRRRRAAAAAVVVVVVVTTTTTTTVVVVVVVPPPPPPPEEEEEEEEELLLLLLLLTTTTTTTQQQQQQQQQQQQQQQQQQMMMMMMMMMMMMMMMMDDDDDDDDPPPPPPPKKKKKKKKKNNNNNNNNMMMMMMMMMMMMMMMMAAAAAAAAAASSSSSSDDDDDDDDFFFFFFFFFFFRRRRRRRRRRRNNNNNNNNGGGGRRRRRRRRRRRYYYYYYYYYYYYLLLLLLLLTTTTTTTCCCCCCSSSSSSTTTTTTTIIIIIIIIFFFFFFFFFFFRRRRRRRRRRRGGGGKKKKKKKKKVVVVVVVAAAAAMMMMMMMMKKKKKKKKKEEEEEEEEEVVVVVVVEEEEEEEEEDDDDDDDDQQQQQQQQQMMMMMMMMRRRRRRRRRRRTTTTTTTVVVVVVVQQQQQQQQQNNNNNNNNKKKKKKKKKNNNNNNNNSSSSSSAAAAAYYYYYYYYYYYYFFFFFFFFFFFVVVVVVVEEEEEEEEEWWWWWWWWWWWWWWIIIIIIIIPPPPPPPNNNNNNNNNNNNNNNNIIIIIIIIQQQQQQQQQTTTTTTTAAAAACCCCCCAAAAALLLLLLLLSSSSSSPPPPPPPPPPPPPPRRRRRRRRRRRGGGGLLLLLLLLKKKKKKKKKIIIIIIIISSSSSSSSSSSSTTTTTTTFFFFFFFFFFFVVVVVVVGGGGNNNNNNNNSSSSSSTTTTTTTAAAAAIIIIIIIIQQQQQQQQQEEEEEEEEEIIIIIIIIFFFFFFFFFFFRRRRRRRRRRRRRRRRRRRRRRVVVVVVVGGGGEEEEEEEEEQQQQQQQQQFFFFFFFFFFFSSSSSSAAAAAMMMMMMMMFFFFFFFFFFFRRRRRRRRRRRRRRRRRRRRRRQQQQQQQQQAAAAAFFFFFFFFFFFLLLLLLLLHHHHHHHHHHWWWWWWWWWWWWWWYYYYYYYYYYYYTTTTTTTSSSSSSEEEEEEEEEGGGGMMMMMMMMDDDDDDDDEEEEEEEEEMMMMMMMMEEEEEEEEEFFFFFFFFFFFTTTTTTTEEEEEEEEEAAAAAEEEEEEEEESSSSSSNNNNNNNNMMMMMMMMNNNNNNNNDDDDDDDDLLLLLLLLVVVVVVVSSSSSSEEEEEEEEEYYYYYYYYYYYYQQQQQQQQQQQQQQQQQQYYYYYYYYYYYYQQQQQQQQQDDDDDDDDAAAAASSSSSSAAAAADDDDDDDDDDDDDDDDGGGGEEEEEEEEEEEEEEEEEEYYYYYYYYYYYYEEEEEEEEEEEEEEEEEEDDDDDDDDAAAAAPPPPPPPMMMMMMMMEEEEEEEEEEEEEEEEEEE

SEQ ID NO: 135 - protein, 3479 aa, Volvox carteri
MMMMMMMMRRRRRRRRRRREEEEEEEEEIIIIIIIIVVVVVVVHHHHHHHHHHIIIIIIIIQQQQQQQQQGGGGGGGGQQQQQQQQQCCCCCCGGGGNNNNNNNNQQQQQQQQQIIIIIIIIGGGGAAAAAKKKKKKKKKFFFFFFFFFFFWWWWWWWWWWWWWWEEEEEEEEEVVVVVVVVVVVVVVSSSSSSDDDDDDDDEEEEEEEEEHHHHHHHHHHGGGGIIIIIIIIDDDDDDDDPPPPPPPTTTTTTTGGGGTTTTTTTYYYYYYYYYYYYHHHHHHHHHHGGGGDDDDDDDDSSSSSSDDDDDDDDLLLLLLLLQQQQQQQQQLLLLLLLLEEEEEEEEERRRRRRRRRRRIIIIIIIINNNNNNNNVVVVVVVYYYYYYYYYYYYFFFFFFFFFFFNNNNNNNNEEEEEEEEEAAAAATTTTTTTGGGGGGGGRRRRRRRRRRRYYYYYYYYYYYYVVVVVVVPPPPPPPRRRRRRRRRRRAAAAAIIIIIIIILLLLLLLLMMMMMMMMDDDDDDDDLLLLLLLLEEEEEEEEEPPPPPPPGGGGTTTTTTTMMMMMMMMDDDDDDDDSSSSSSVVVVVVVRRRRRRRRRRRSSSSSSGGGGPPPPPPPYYYYYYYYYYYYGGGGQQQQQQQQQIIIIIIIIFFFFFFFFFFFRRRRRRRRRRRPPPPPPPDDDDDDDDNNNNNNNNFFFFFFFFFFFVVVVVVVFFFFFFFFFFFGGGGQQQQQQQQQTTTTTTTGGGGAAAAAGGGGNNNNNNNNNNNNNNNNWWWWWWWWWWWWWWAAAAAKKKKKKKKKGGGGHHHHHHHHHHYYYYYYYYYYYYTTTTTTTEEEEEEEEEGGGGAAAAAEEEEEEEEELLLLLLLLIIIIIIIIDDDDDDDDSSSSSSVVVVVVVLLLLLLLLDDDDDDDDVVVVVVVVVVVVVVRRRRRRRRRRRKKKKKKKKKEEEEEEEEEAAAAAEEEEEEEEESSSSSSCCCCCCDDDDDDDDCCCCCCLLLLLLLLQQQQQQQQQGGGGFFFFFFFFFFFQQQQQQQQQVVVVVVVCCCCCCHHHHHHHHHHSSSSSSLLLLLLLLGGGGGGGGGGGGTTTTTTTGGGGSSSSSSGGGGMMMMMMMMGGGGTTTTTTTLLLLLLLLLLLLLLLLIIIIIIIISSSSSSKKKKKKKKKIIIIIIIIRRRRRRRRRRREEEEEEEEEEEEEEEEEEYYYYYYYYYYYYPPPPPPPDDDDDDDDRRRRRRRRRRRMMMMMMMMMMMMMMMMLLLLLLLLTTTTTTTFFFFFFFFFFFSSSSSSVVVVVVVVVVVVVVPPPPPPPSSSSSSPPPPPPPKKKKKKKKKVVVVVVVSSSSSSDDDDDDDDTTTTTTTVVVVVVVVVVVVVVEEEEEEEEEPPPPPPPYYYYYYYYYYYYNNNNNNNNAAAAATTTTTTTLLLLLLLLSSSSSSVVVVVVVHHHHHHHHHHQQQQQQQQQLLLLLLLLVVVVVVVEEEEEEEEENNNNNNNNAAAAADDDDDDDDEEEEEEEEECCCCCCMMMMMMMMVVVVVVVLLLLLLLLDDDDDDDDNNNNNNNNEEEEEEEEEAAAAALLLLLLLLYYYYYYYYYYYYDDDDDDDDIIIIIIIICCCCCCFFFFFFFFFFFRRRRRRRRRRRTTTTTTTLLLLLLLLKKKKKKKKKLLLLLLLLTTTTTTTTTTTTTTPPPPPPPTTTTTTTFFFFFFFFFFFGGGGDDDDDDDDLLLLLLLLNNNNNNNNHHHHHHHHHHLLLLLLLLIIIIIIIISSSSSSAAAAAVVVVVVVMMMMMMMMSSSSSSGGGGIIIIIIIITTTTTTTCCCCCCCCCCCCLLLLLLLLRRRRRRRRRRRFFFFFFFFFFFPPPPPPPGGGGQQQQQQQQQLLLLLLLLNNNNNNNNAAAAADDDDDDDDLLLLLLLLRRRRRRRRRRRKKKKKKKKKLLLLLLLLAAAAAVVVVVVVNNNNNNNNLLLLLLLLIIIIIIIIPPPPPPPFFFFFFFFFFFPPPPPPPRRRRRRRRRRRLLLLLLLLHHHHHHHHHHFFFFFFFFFFFFFFFFFFFFFFMMMMMMMMVVVVVVVGGGGFFFFFFFFFFFTTTTTTTPPPPPPPLLLLLLLLTTTTTTTSSSSSSRRRRRRRRRRRGGGGSSSSSSQQQQQQQQQQQQQQQQQQYYYYYYYYYYYYRRRRRRRRRRRAAAAALLLLLLLLTTTTTTTVVVVVVVPPPPPPPEEEEEEEEELLLLLLLLTTTTTTTQQQQQQQQQQQQQQQQQQMMMMMMMMWWWWWWWWWWWWWWDDDDDDDDAAAAAKKKKKKKKKNNNNNNNNMMMMMMMMMMMMMMMMCCCCCCAAAAAAAAAADDDDDDDDPPPPPPPRRRRRRRRRRRHHHHHHHHHHGGGGRRRRRRRRRRRYYYYYYYYYYYYLLLLLLLLTTTTTTTAAAAASSSSSSAAAAALLLLLLLLFFFFFFFFFFFRRRRRRRRRRRGGGGRRRRRRRRRRRMMMMMMMMSSSSSSTTTTTTTKKKKKKKKKEEEEEEEEEVVVVVVVDDDDDDDDEEEEEEEEEQQQQQQQQQMMMMMMMMLLLLLLLLNNNNNNNNVVVVVVVQQQQQQQQQNNNNNNNNKKKKKKKKKNNNNNNNNSSSSSSSSSSSSYYYYYYYYYYYYFFFFFFFFFFFVVVVVVVEEEEEEEEEWWWWWWWWWWWWWWIIIIIIIIPPPPPPPNNNNNNNNNNNNNNNNVVVVVVVKKKKKKKKKSSSSSSSSSSSSVVVVVVVCCCCCCDDDDDDDDIIIIIIIIPPPPPPPPPPPPPPKKKKKKKKKGGGGLLLLLLLLKKKKKKKKKMMMMMMMMSSSSSSAAAAATTTTTTTFFFFFFFFFFFIIIIIIIIGGGGNNNNNNNNSSSSSSTTTTTTTAAAAAIIIIIIIIQQQQQQQQQEEEEEEEEEMMMMMMMMFFFFFFFFFFFKKKKKKKKKRRRRRRRRRRRVVVVVVVSSSSSSEEEEEEEEEQQQQQQQQQFFFFFFFFFFFTTTTTTTAAAAAMMMMMMMMFFFFFFFFFFFRRRRRRRRRRRRRRRRRRRRRRKKKKKKKKKAAAAAFFFFFFFFFFFLLLLLLLLHHHHHHHHHHWWWWWWWWWWWWWWYYYYYYYYYYYYTTTTTTTGGGGEEEEEEEEEGGGGMMMMMMMMDDDDDDDDEEEEEEEEEMMMMMMMMEEEEEEEEEFFFFFFFFFFFTTTTTTTEEEEEEEEEAAAAAEEEEEEEEESSSSSSNNNNNNNNMMMMMMMMNNNNNNNNDDDDDDDDLLLLLLLLVVVVVVVSSSSSSEEEEEEEEEYYYYYYYYYYYYQQQQQQQQQQQQQQQQQQYYYYYYYYYYYYQQQQQQQQQDDDDDDDDAAAAASSSSSSAAAAAEEEEEEEEEEEEEEEEEEEEEEEEEEEGGGGEEEEEEEEEFFFFFFFFFFFEEEEEEEEEGGGGEEEEEEEEEEEEEEEEEEEEEEEEEEEEEEEEEEEENNNNNNNNN

SEQ ID NO: 136 - protein, 3509 aa, Triticum aestivum
MMMMMMMMRRRRRRRRRRREEEEEEEEEIIIIIIIILLLLLLLLHHHHHHHHHHIIIIIIIIQQQQQQQQQGGGGGGGGQQQQQQQQQCCCCCCGGGGNNNNNNNNQQQQQQQQQIIIIIIIIGGGGSSSSSSKKKKKKKKKFFFFFFFFFFFWWWWWWWWWWWWWWEEEEEEEEEVVVVVVVVVVVVVVCCCCCCDDDDDDDDEEEEEEEEEHHHHHHHHHHGGGGIIIIIIIIDDDDDDDDPPPPPPPTTTTTTTGGGGRRRRRRRRRRRYYYYYYYYYYYYVVVVVVVGGGGTTTTTTTSSSSSSDDDDDDDDLLLLLLLLQQQQQQQQQLLLLLLLLEEEEEEEEERRRRRRRRRRRVVVVVVVNNNNNNNNVVVVVVVYYYYYYYYYYYYYYYYYYYYYYYYNNNNNNNNEEEEEEEEEAAAAASSSSSSCCCCCCGGGGRRRRRRRRRRRFFFFFFFFFFFVVVVVVVPPPPPPPRRRRRRRRRRRAAAAAVVVVVVVLLLLLLLLMMMMMMMMDDDDDDDDLLLLLLLLEEEEEEEEEPPPPPPPGGGGTTTTTTTMMMMMMMMDDDDDDDDSSSSSSVVVVVVVRRRRRRRRRRRTTTTTTTGGGGPPPPPPPYYYYYYYYYYYYGGGGQQQQQQQQQIIIIIIIIFFFFFFFFFFFRRRRRRRRRRRPPPPPPPDDDDDDDDNNNNNNNNFFFFFFFFFFFVVVVVVVFFFFFFFFFFFGGGGQQQQQQQQQSSSSSSGGGGAAAAAGGGGNNNNNNNNNNNNNNNNWWWWWWWWWWWWWWAAAAAKKKKKKKKKGGGGHHHHHHHHHHYYYYYYYYYYYYTTTTTTTEEEEEEEEEGGGGAAAAAEEEEEEEEELLLLLLLLIIIIIIIIDDDDDDDDSSSSSSVVVVVVVLLLLLLLLDDDDDDDDVVVVVVVVVVVVVVRRRRRRRRRRRKKKKKKKKKEEEEEEEEEAAAAAEEEEEEEEENNNNNNNNCCCCCCDDDDDDDDCCCCCCLLLLLLLLQQQQQQQQQGGGGFFFFFFFFFFFQQQQQQQQQVVVVVVVCCCCCCHHHHHHHHHHSSSSSSLLLLLLLLGGGGGGGGGGGGTTTTTTTGGGGSSSSSSGGGGMMMMMMMMGGGGTTTTTTTLLLLLLLLLLLLLLLLIIIIIIIISSSSSSKKKKKKKKKIIIIIIIIRRRRRRRRRRREEEEEEEEEEEEEEEEEEYYYYYYYYYYYYPPPPPPPDDDDDDDDRRRRRRRRRRRMMMMMMMMMMMMMMMMLLLLLLLLTTTTTTTFFFFFFFFFFFSSSSSSVVVVVVVFFFFFFFFFFFPPPPPPPSSSSSSPPPPPPPKKKKKKKKKVVVVVVVSSSSSSDDDDDDDDTTTTTTTVVVVVVVVVVVVVVEEEEEEEEEPPPPPPPYYYYYYYYYYYYNNNNNNNNAAAAATTTTTTTLLLLLLLLSSSSSSVVVVVVVHHHHHHHHHHQQQQQQQQQLLLLLLLLVVVVVVVEEEEEEEEENNNNNNNNAAAAADDDDDDDDEEEEEEEEECCCCCCMMMMMMMMVVVVVVVLLLLLLLLDDDDDDDDNNNNNNNNEEEEEEEEEAAAAALLLLLLLLYYYYYYYYYYYYDDDDDDDDIIIIIIIICCCCCCFFFFFFFFFFFRRRRRRRRRRRTTTTTTTLLLLLLLLKKKKKKKKKLLLLLLLLTTTTTTTTTTTTTTPPPPPPPSSSSSSFFFFFFFFFFFGGGGDDDDDDDDLLLLLLLLNNNNNNNNHHHHHHHHHHLLLLLLLLIIIIIIIISSSSSSAAAAATTTTTTTMMMMMMMMSSSSSSGGGGVVVVVVVTTTTTTTCCCCCCCCCCCCLLLLLLLLRRRRRRRRRRRFFFFFFFFFFFPPPPPPPGGGGQQQQQQQQQLLLLLLLLNNNNNNNNSSSSSSDDDDDDDDLLLLLLLLRRRRRRRRRRRKKKKKKKKKLLLLLLLLAAAAAVVVVVVVNNNNNNNNLLLLLLLLIIIIIIIIPPPPPPPFFFFFFFFFFFPPPPPPPRRRRRRRRRRRLLLLLLLLHHHHHHHHHHFFFFFFFFFFFFFFFFFFFFFFMMMMMMMMVVVVVVVGGGGFFFFFFFFFFFAAAAAPPPPPPPLLLLLLLLTTTTTTTSSSSSSRRRRRRRRRRRGGGGSSSSSSQQQQQQQQQMMMMMMMMYYYYYYYYYYYYRRRRRRRRRRRPPPPPPPLLLLLLLLTTTTTTTVVVVVVVPPPPPPPEEEEEEEEELLLLLLLLTTTTTTTQQQQQQQQQQQQQQQQQQMMMMMMMMWWWWWWWWWWWWWWDDDDDDDDSSSSSSKKKKKKKKKNNNNNNNNMMMMMMMMMMMMMMMMCCCCCCAAAAAAAAAADDDDDDDDPPPPPPPRRRRRRRRRRRHHHHHHHHHHGGGGRRRRRRRRRRRYYYYYYYYYYYYLLLLLLLLTTTTTTTAAAAASSSSSSAAAAAMMMMMMMMFFFFFFFFFFFRRRRRRRRRRRGGGGKKKKKKKKKMMMMMMMMSSSSSSTTTTTTTKKKKKKKKKEEEEEEEEEVVVVVVVDDDDDDDDEEEEEEEEEQQQQQQQQQMMMMMMMMIIIIIIIINNNNNNNNVVVVVVVQQQQQQQQQNNNNNNNNKKKKKKKKKNNNNNNNNSSSSSSSSSSSSYYYYYYYYYYYYFFFFFFFFFFFVVVVVVVEEEEEEEEEWWWWWWWWWWWWWWIIIIIIIIPPPPPPPNNNNNNNNNNNNNNNNVVVVVVVKKKKKKKKKSSSSSSSSSSSSVVVVVVVCCCCCCDDDDDDDDIIIIIIIIPPPPPPPPPPPPPPRRRRRRRRRRRGGGGLLLLLLLLSSSSSSMMMMMMMMAAAAASSSSSSTTTTTTTFFFFFFFFFFFIIIIIIIIGGGGNNNNNNNNSSSSSSTTTTTTTSSSSSSIIIIIIIIQQQQQQQQQEEEEEEEEEMMMMMMMMFFFFFFFFFFFRRRRRRRRRRRRRRRRRRRRRRVVVVVVVSSSSSSEEEEEEEEEQQQQQQQQQFFFFFFFFFFFTTTTTTTAAAAAMMMMMMMMFFFFFFFFFFFRRRRRRRRRRRRRRRRRRRRRRKKKKKKKKKAAAAAFFFFFFFFFFFLLLLLLLLHHHHHHHHHHWWWWWWWWWWWWWWYYYYYYYYYYYYTTTTTTTGGGGEEEEEEEEEGGGGMMMMMMMMDDDDDDDDEEEEEEEEEMMMMMMMMEEEEEEEEEFFFFFFFFFFFTTTTTTTEEEEEEEEEAAAAAEEEEEEEEESSSSSSNNNNNNNNMMMMMMMMNNNNNNNNDDDDDDDDLLLLLLLLVVVVVVVSSSSSSEEEEEEEEEYYYYYYYYYYYYQQQQQQQQQQQQQQQQQQYYYYYYYYYYYYQQQQQQQQQDDDDDDDDAAAAATTTTTTTAAAAADDDDDDDDEEEEEEEEEEEEEEEEEEGGGGEEEEEEEEEYYYYYYYYYYYYEEEEEEEEEEEEEEEEEEEEEEEEEEEEEEEEEEEEEEEEEEEEELLLLLLLLEEEEEEEEEQQQQQQQQQEEEEEEEEEE

SEQ ID NO: 137 - protein, 3222 aa, Anemia phyllitidis
TTTTTTTGGGGTTTTTTTYYYYYYYYYYYYRRRRRRRRRRRGGGGDDDDDDDDSSSSSSEEEEEEEEETTTTTTTQQQQQQQQQLLLLLLLLEEEEEEEEERRRRRRRRRRRVVVVVVVNNNNNNNNVVVVVVVYYYYYYYYYYYYYYYYYYYYYYYYNNNNNNNNEEEEEEEEEAAAAASSSSSSCCCCCCGGGGRRRRRRRRRRRYYYYYYYYYYYYVVVVVVVPPPPPPPRRRRRRRRRRRAAAAAVVVVVVVLLLLLLLLMMMMMMMMDDDDDDDDLLLLLLLLEEEEEEEEEPPPPPPPGGGGTTTTTTTMMMMMMMMDDDDDDDDSSSSSSVVVVVVVRRRRRRRRRRRSSSSSSGGGGPPPPPPPYYYYYYYYYYYYGGGGQQQQQQQQQIIIIIIIIFFFFFFFFFFFRRRRRRRRRRRPPPPPPPDDDDDDDDNNNNNNNNFFFFFFFFFFFVVVVVVVFFFFFFFFFFFGGGGQQQQQQQQQSSSSSSGGGGAAAAAGGGGNNNNNNNNNNNNNNNNWWWWWWWWWWWWWWAAAAAKKKKKKKKKGGGGHHHHHHHHHHYYYYYYYYYYYYTTTTTTTEEEEEEEEEGGGGAAAAAEEEEEEEEELLLLLLLLIIIIIIIIDDDDDDDDSSSSSSVVVVVVVLLLLLLLLDDDDDDDDVVVVVVVVVVVVVVRRRRRRRRRRRKKKKKKKKKEEEEEEEEEAAAAAEEEEEEEEENNNNNNNNCCCCCCDDDDDDDDCCCCCCLLLLLLLLQQQQQQQQQGGGGFFFFFFFFFFFQQQQQQQQQVVVVVVVCCCCCCHHHHHHHHHHSSSSSSLLLLLLLLGGGGGGGGGGGGTTTTTTTGGGGSSSSSSGGGGMMMMMMMMGGGGTTTTTTTLLLLLLLLLLLLLLLLIIIIIIIISSSSSSKKKKKKKKKIIIIIIIIRRRRRRRRRRREEEEEEEEEEEEEEEEEEYYYYYYYYYYYYPPPPPPPDDDDDDDDRRRRRRRRRRRMMMMMMMMMMMMMMMMGGGGTTTTTTTFFFFFFFFFFFSSSSSSVVVVVVVFFFFFFFFFFFPPPPPPPSSSSSSPPPPPPPKKKKKKKKKVVVVVVVSSSSSSDDDDDDDDTTTTTTTVVVVVVVVVVVVVVEEEEEEEEEPPPPPPPYYYYYYYYYYYYNNNNNNNNAAAAATTTTTTTLLLLLLLLSSSSSSVVVVVVVHHHHHHHHHHQQQQQQQQQLLLLLLLLVVVVVVVEEEEEEEEENNNNNNNNAAAAADDDDDDDDEEEEEEEEECCCCCCMMMMMMMMVVVVVVVLLLLLLLLDDDDDDDDNNNNNNNNEEEEEEEEEAAAAALLLLLLLLYYYYYYYYYYYYDDDDDDDDIIIIIIIICCCCCCFFFFFFFFFFFRRRRRRRRRRRTTTTTTTLLLLLLLLKKKKKKKKKLLLLLLLLVVVVVVVTTTTTTTPPPPPPPTTTTTTTFFFFFFFFFFFGGGGDDDDDDDDLLLLLLLLNNNNNNNNHHHHHHHHHHLLLLLLLLIIIIIIIISSSSSSAAAAATTTTTTTMMMMMMMMSSSSSSGGGGVVVVVVVTTTTTTTCCCCCCCCCCCCLLLLLLLLRRRRRRRRRRRFFFFFFFFFFFPPPPPPPGGGGQQQQQQQQQLLLLLLLLNNNNNNNNSSSSSSDDDDDDDDLLLLLLLLRRRRRRRRRRRKKKKKKKKKLLLLLLLLAAAAAVVVVVVVNNNNNNNNLLLLLLLLIIIIIIIIPPPPPPPFFFFFFFFFFFPPPPPPPRRRRRRRRRRRLLLLLLLLHHHHHHHHHHFFFFFFFFFFFFFFFFFFFFFFMMMMMMMMVVVVVVVGGGGFFFFFFFFFFFAAAAAPPPPPPPLLLLLLLLTTTTTTTSSSSSSRRRRRRRRRRRGGGGSSSSSSQQQQQQQQQQQQQQQQQQYYYYYYYYYYYYRRRRRRRRRRRAAAAALLLLLLLLTTTTTTTVVVVVVVPPPPPPPEEEEEEEEELLLLLLLLTTTTTTTQQQQQQQQQQQQQQQQQQMMMMMMMMRRRRRRRRRRRDDDDDDDDAAAAAKKKKKKKKKNNNNNNNNMMMMMMMMMMMMMMMMCCCCCCAAAAAAAAAADDDDDDDDPPPPPPPRRRRRRRRRRRHHHHHHHHHHGGGGRRRRRRRRRRRYYYYYYYYYYYYLLLLLLLLTTTTTTTAAAAASSSSSSAAAAAMMMMMMMMFFFFFFFFFFFRRRRRRRRRRRGGGGKKKKKKKKKMMMMMMMMSSSSSSTTTTTTTKKKKKKKKKEEEEEEEEEVVVVVVVDDDDDDDDEEEEEEEEEQQQQQQQQQMMMMMMMMIIIIIIIINNNNNNNNVVVVVVVQQQQQQQQQNNNNNNNNKKKKKKKKKNNNNNNNNSSSSSSSSSSSSYYYYYYYYYYYYFFFFFFFFFFFVVVVVVVEEEEEEEEEWWWWWWWWWWWWWWIIIIIIIIPPPPPPPNNNNNNNNNNNNNNNNVVVVVVVKKKKKKKKKSSSSSSSSSSSSVVVVVVVCCCCCCDDDDDDDDIIIIIIIIPPPPPPPPPPPPPPVVVVVVVGGGGLLLLLLLLKKKKKKKKKMMMMMMMMAAAAACCCCCCTTTTTTTFFFFFFFFFFFIIIIIIIIGGGGNNNNNNNNSSSSSSTTTTTTTSSSSSSIIIIIIIIQQQQQQQQQEEEEEEEEEMMMMMMMMFFFFFFFFFFFRRRRRRRRRRRRRRRRRRRRRRVVVVVVVRRRRRRRRRRRDDDDDDDDQQQQQQQQQFFFFFFFFFFFTTTTTTTAAAAAMMMMMMMMFFFFFFFFFFFRRRRRRRRRRRGGGGKKKKKKKKKAAAAAFFFFFFFFFFFLLLLLLLLHHHHHHHHHHWWWWWWWWWWWWWWYYYYYYYYYYYYTTTTTTTGGGGEEEEEEEEEGGGGMMMMMMMMDDDDDDDDEEEEEEEEEMMMMMMMMEEEEEEEEEFFFFFFFFFFFTTTTTTTEEEEEEEEEAAAAAEEEEEEEEESSSSSSNNNNNNNNMMMMMMMMNNNNNNNNDDDDDDDDLLLLLLLLVVVVVVVSSSSSSEEEEEEEEEYYYYYYYYYYYYQQQQQQQQQQQQQQQQQQYYYYYYYYYYYYQQQQQQQQQDDDDDDDDAAAAATTTTTTTAAAAAEEEEEEEEEPPPPPPPEEEEEEEEEGGGGGGGGYYYYYYYYYYYYEEEEEEEEEEEEEEEEEEDDDDDDDDYYYYYYYYYYYYDDDDDDDDEEEEEEEEEAAAAAA

SEQ ID NO: 138 - protein, 3551 aa, Arabidopsis thaliana
MMMMMMMMRRRRRRRRRRREEEEEEEEEIIIIIIIILLLLLLLLHHHHHHHHHHIIIIIIIIQQQQQQQQQGGGGGGGGQQQQQQQQQCCCCCCGGGGNNNNNNNNQQQQQQQQQIIIIIIIIGGGGAAAAAKKKKKKKKKFFFFFFFFFFFWWWWWWWWWWWWWWEEEEEEEEEVVVVVVVVVVVVVVCCCCCCAAAAAEEEEEEEEEHHHHHHHHHHGGGGIIIIIIIIDDDDDDDDPPPPPPPTTTTTTTGGGGRRRRRRRRRRRYYYYYYYYYYYYTTTTTTTGGGGDDDDDDDDSSSSSSDDDDDDDDLLLLLLLLQQQQQQQQQLLLLLLLLEEEEEEEEERRRRRRRRRRRIIIIIIIINNNNNNNNVVVVVVVYYYYYYYYYYYYYYYYYYYYYYYYNNNNNNNNEEEEEEEEEAAAAASSSSSSCCCCCCGGGGRRRRRRRRRRRFFFFFFFFFFFVVVVVVVPPPPPPPRRRRRRRRRRRAAAAAVVVVVVVLLLLLLLLMMMMMMMMDDDDDDDDLLLLLLLLEEEEEEEEEPPPPPPPGGGGTTTTTTTMMMMMMMMDDDDDDDDSSSSSSLLLLLLLLRRRRRRRRRRRSSSSSSGGGGPPPPPPPYYYYYYYYYYYYGGGGQQQQQQQQQTTTTTTTFFFFFFFFFFFRRRRRRRRRRRPPPPPPPDDDDDDDDNNNNNNNNFFFFFFFFFFFVVVVVVVFFFFFFFFFFFGGGGQQQQQQQQQSSSSSSGGGGAAAAAGGGGNNNNNNNNNNNNNNNNWWWWWWWWWWWWWWAAAAAKKKKKKKKKGGGGHHHHHHHHHHYYYYYYYYYYYYTTTTTTTEEEEEEEEEGGGGAAAAAEEEEEEEEELLLLLLLLIIIIIIIIDDDDDDDDSSSSSSVVVVVVVLLLLLLLLDDDDDDDDVVVVVVVVVVVVVVRRRRRRRRRRRKKKKKKKKKEEEEEEEEEAAAAAEEEEEEEEENNNNNNNNCCCCCCDDDDDDDDCCCCCCLLLLLLLLQQQQQQQQQGGGGFFFFFFFFFFFQQQQQQQQQVVVVVVVCCCCCCHHHHHHHHHHSSSSSSLLLLLLLLGGGGGGGGGGGGTTTTTTTGGGGSSSSSSGGGGMMMMMMMMGGGGTTTTTTTLLLLLLLLLLLLLLLLIIIIIIIISSSSSSKKKKKKKKKIIIIIIIIRRRRRRRRRRREEEEEEEEEEEEEEEEEEYYYYYYYYYYYYPPPPPPPDDDDDDDDRRRRRRRRRRRMMMMMMMMMMMMMMMMLLLLLLLLTTTTTTTFFFFFFFFFFFSSSSSSVVVVVVVFFFFFFFFFFFPPPPPPPSSSSSSPPPPPPPKKKKKKKKKVVVVVVVSSSSSSDDDDDDDDTTTTTTTVVVVVVVVVVVVVVEEEEEEEEEPPPPPPPYYYYYYYYYYYYNNNNNNNNAAAAATTTTTTTLLLLLLLLSSSSSSVVVVVVVHHHHHHHHHHQQQQQQQQQLLLLLLLLVVVVVVVEEEEEEEEENNNNNNNNAAAAADDDDDDDDEEEEEEEEECCCCCCMMMMMMMMVVVVVVVLLLLLLLLDDDDDDDDNNNNNNNNEEEEEEEEEAAAAALLLLLLLLYYYYYYYYYYYYDDDDDDDDIIIIIIIICCCCCCFFFFFFFFFFFRRRRRRRRRRRTTTTTTTLLLLLLLLKKKKKKKKKLLLLLLLLTTTTTTTTTTTTTTPPPPPPPSSSSSSFFFFFFFFFFFGGGGDDDDDDDDLLLLLLLLNNNNNNNNHHHHHHHHHHLLLLLLLLIIIIIIIISSSSSSAAAAATTTTTTTMMMMMMMMSSSSSSGGGGVVVVVVVTTTTTTTCCCCCCCCCCCCLLLLLLLLRRRRRRRRRRRFFFFFFFFFFFPPPPPPPGGGGQQQQQQQQQLLLLLLLLNNNNNNNNSSSSSSDDDDDDDDLLLLLLLLRRRRRRRRRRRKKKKKKKKKLLLLLLLLAAAAAVVVVVVVNNNNNNNNLLLLLLLLIIIIIIIIPPPPPPPFFFFFFFFFFFPPPPPPPRRRRRRRRRRRLLLLLLLLHHHHHHHHHHFFFFFFFFFFFFFFFFFFFFFFMMMMMMMMVVVVVVVGGGGFFFFFFFFFFFAAAAAPPPPPPPLLLLLLLLTTTTTTTSSSSSSRRRRRRRRRRRGGGGSSSSSSQQQQQQQQQQQQQQQQQQYYYYYYYYYYYYRRRRRRRRRRRSSSSSSLLLLLLLLTTTTTTTVVVVVVVPPPPPPPEEEEEEEEELLLLLLLLTTTTTTTQQQQQQQQQQQQQQQQQQMMMMMMMMWWWWWWWWWWWWWWDDDDDDDDSSSSSSKKKKKKKKKNNNNNNNNMMMMMMMMMMMMMMMMCCCCCCAAAAAAAAAADDDDDDDDPPPPPPPRRRRRRRRRRRHHHHHHHHHHGGGGRRRRRRRRRRRYYYYYYYYYYYYLLLLLLLLTTTTTTTAAAAASSSSSSAAAAAMMMMMMMMFFFFFFFFFFFRRRRRRRRRRRGGGGKKKKKKKKKMMMMMMMMSSSSSSTTTTTTTKKKKKKKKKEEEEEEEEEVVVVVVVDDDDDDDDEEEEEEEEEQQQQQQQQQMMMMMMMMLLLLLLLLNNNNNNNNVVVVVVVQQQQQQQQQNNNNNNNNKKKKKKKKKNNNNNNNNSSSSSSSSSSSSYYYYYYYYYYYYFFFFFFFFFFFVVVVVVVEEEEEEEEEWWWWWWWWWWWWWWIIIIIIIIPPPPPPPNNNNNNNNNNNNNNNNVVVVVVVKKKKKKKKKSSSSSSTTTTTTTVVVVVVVCCCCCCDDDDDDDDIIIIIIIIPPPPPPPPPPPPPPTTTTTTTGGGGLLLLLLLLKKKKKKKKKMMMMMMMMAAAAASSSSSSTTTTTTTFFFFFFFFFFFIIIIIIIIGGGGNNNNNNNNSSSSSSTTTTTTTSSSSSSIIIIIIIIQQQQQQQQQEEEEEEEEEMMMMMMMMFFFFFFFFFFFRRRRRRRRRRRRRRRRRRRRRRVVVVVVVSSSSSSEEEEEEEEEQQQQQQQQQFFFFFFFFFFFTTTTTTTAAAAAMMMMMMMMFFFFFFFFFFFRRRRRRRRRRRRRRRRRRRRRRKKKKKKKKKAAAAAFFFFFFFFFFFLLLLLLLLHHHHHHHHHHWWWWWWWWWWWWWWYYYYYYYYYYYYTTTTTTTGGGGEEEEEEEEEGGGGMMMMMMMMDDDDDDDDEEEEEEEEEMMMMMMMMEEEEEEEEEFFFFFFFFFFFTTTTTTTEEEEEEEEEAAAAAEEEEEEEEESSSSSSNNNNNNNNMMMMMMMMNNNNNNNNDDDDDDDDLLLLLLLLVVVVVVVSSSSSSEEEEEEEEEYYYYYYYYYYYYQQQQQQQQQQQQQQQQQQYYYYYYYYYYYYQQQQQQQQQDDDDDDDDAAAAATTTTTTTAAAAADDDDDDDDEEEEEEEEEEEEEEEEEEGGGGDDDDDDDDYYYYYYYYYYYYEEEEEEEEEDDDDDDDDEEEEEEEEEEEEEEEEEEEEEEEEEEEGGGGEEEEEEEEEYYYYYYYYYYYYQQQQQQQQQQQQQQQQQQEEEEEEEEEEEEEEEEEEEEEEEEEEEYYYYYYYYYYYYY

SEQ ID NO: 139 - protein, 3531 aa, Caenorhabditis elegans
MMMMMMMMRRRRRRRRRRREEEEEEEEEIIIIIIIIVVVVVVVHHHHHHHHHHVVVVVVVQQQQQQQQQAAAAAGGGGQQQQQQQQQCCCCCCGGGGNNNNNNNNQQQQQQQQQIIIIIIIIGGGGSSSSSSKKKKKKKKKFFFFFFFFFFFWWWWWWWWWWWWWWEEEEEEEEEVVVVVVVIIIIIIIISSSSSSDDDDDDDDEEEEEEEEEHHHHHHHHHHGGGGIIIIIIIIQQQQQQQQQPPPPPPPDDDDDDDDGGGGTTTTTTTFFFFFFFFFFFKKKKKKKKKGGGGEEEEEEEEETTTTTTTDDDDDDDDLLLLLLLLQQQQQQQQQLLLLLLLLEEEEEEEEERRRRRRRRRRRIIIIIIIIDDDDDDDDVVVVVVVYYYYYYYYYYYYYYYYYYYYYYYYNNNNNNNNEEEEEEEEEAAAAANNNNNNNNNNNNNNNNGGGGKKKKKKKKKYYYYYYYYYYYYVVVVVVVPPPPPPPRRRRRRRRRRRAAAAAVVVVVVVLLLLLLLLVVVVVVVDDDDDDDDLLLLLLLLEEEEEEEEEPPPPPPPGGGGTTTTTTTMMMMMMMMDDDDDDDDSSSSSSVVVVVVVRRRRRRRRRRRSSSSSSGGGGPPPPPPPFFFFFFFFFFFGGGGQQQQQQQQQLLLLLLLLFFFFFFFFFFFRRRRRRRRRRRPPPPPPPDDDDDDDDNNNNNNNNFFFFFFFFFFFVVVVVVVFFFFFFFFFFFGGGGQQQQQQQQQSSSSSSGGGGAAAAAGGGGNNNNNNNNNNNNNNNNWWWWWWWWWWWWWWAAAAAKKKKKKKKKGGGGHHHHHHHHHHYYYYYYYYYYYYTTTTTTTEEEEEEEEEGGGGAAAAAEEEEEEEEELLLLLLLLVVVVVVVDDDDDDDDNNNNNNNNVVVVVVVLLLLLLLLDDDDDDDDVVVVVVVIIIIIIIIRRRRRRRRRRRKKKKKKKKKEEEEEEEEEAAAAAEEEEEEEEEGGGGCCCCCCDDDDDDDDCCCCCCLLLLLLLLQQQQQQQQQGGGGFFFFFFFFFFFQQQQQQQQQLLLLLLLLTTTTTTTHHHHHHHHHHSSSSSSLLLLLLLLGGGGGGGGGGGGTTTTTTTGGGGSSSSSSGGGGMMMMMMMMGGGGTTTTTTTLLLLLLLLLLLLLLLLIIIIIIIISSSSSSKKKKKKKKKIIIIIIIIRRRRRRRRRRREEEEEEEEEEEEEEEEEEYYYYYYYYYYYYPPPPPPPDDDDDDDDRRRRRRRRRRRIIIIIIIIMMMMMMMMSSSSSSSSSSSSFFFFFFFFFFFSSSSSSVVVVVVVVVVVVVVPPPPPPPSSSSSSPPPPPPPKKKKKKKKKVVVVVVVSSSSSSDDDDDDDDTTTTTTTVVVVVVVVVVVVVVEEEEEEEEEPPPPPPPYYYYYYYYYYYYNNNNNNNNAAAAATTTTTTTLLLLLLLLSSSSSSVVVVVVVHHHHHHHHHHQQQQQQQQQLLLLLLLLVVVVVVVEEEEEEEEENNNNNNNNTTTTTTTDDDDDDDDEEEEEEEEETTTTTTTYYYYYYYYYYYYCCCCCCIIIIIIIIDDDDDDDDNNNNNNNNEEEEEEEEEAAAAALLLLLLLLYYYYYYYYYYYYDDDDDDDDIIIIIIIICCCCCCYYYYYYYYYYYYRRRRRRRRRRRTTTTTTTLLLLLLLLKKKKKKKKKLLLLLLLLTTTTTTTNNNNNNNNPPPPPPPTTTTTTTYYYYYYYYYYYYGGGGDDDDDDDDLLLLLLLLNNNNNNNNHHHHHHHHHHLLLLLLLLVVVVVVVSSSSSSLLLLLLLLTTTTTTTMMMMMMMMSSSSSSGGGGVVVVVVVTTTTTTTTTTTTTTCCCCCCLLLLLLLLRRRRRRRRRRRFFFFFFFFFFFPPPPPPPGGGGQQQQQQQQQLLLLLLLLNNNNNNNNAAAAADDDDDDDDLLLLLLLLRRRRRRRRRRRKKKKKKKKKLLLLLLLLAAAAAVVVVVVVNNNNNNNNMMMMMMMMVVVVVVVPPPPPPPFFFFFFFFFFFPPPPPPPRRRRRRRRRRRLLLLLLLLHHHHHHHHHHFFFFFFFFFFFFFFFFFFFFFFMMMMMMMMPPPPPPPGGGGFFFFFFFFFFFAAAAAPPPPPPPLLLLLLLLSSSSSSAAAAAKKKKKKKKKGGGGTTTTTTTQQQQQQQQQAAAAAYYYYYYYYYYYYRRRRRRRRRRRAAAAALLLLLLLLTTTTTTTVVVVVVVAAAAAEEEEEEEEELLLLLLLLTTTTTTTQQQQQQQQQQQQQQQQQQMMMMMMMMFFFFFFFFFFFDDDDDDDDAAAAAKKKKKKKKKNNNNNNNNMMMMMMMMMMMMMMMMAAAAAAAAAACCCCCCDDDDDDDDPPPPPPPRRRRRRRRRRRHHHHHHHHHHGGGGRRRRRRRRRRRYYYYYYYYYYYYLLLLLLLLTTTTTTTVVVVVVVAAAAAAAAAAMMMMMMMMFFFFFFFFFFFRRRRRRRRRRRGGGGRRRRRRRRRRRMMMMMMMMSSSSSSMMMMMMMMRRRRRRRRRRREEEEEEEEEVVVVVVVDDDDDDDDEEEEEEEEEQQQQQQQQQMMMMMMMMLLLLLLLLNNNNNNNNVVVVVVVQQQQQQQQQNNNNNNNNKKKKKKKKKNNNNNNNNSSSSSSSSSSSSYYYYYYYYYYYYFFFFFFFFFFFVVVVVVVEEEEEEEEEWWWWWWWWWWWWWWIIIIIIIIPPPPPPPNNNNNNNNNNNNNNNNVVVVVVVKKKKKKKKKTTTTTTTAAAAAVVVVVVVCCCCCCDDDDDDDDIIIIIIIIPPPPPPPPPPPPPPRRRRRRRRRRRGGGGLLLLLLLLKKKKKKKKKMMMMMMMMAAAAAAAAAATTTTTTTFFFFFFFFFFFVVVVVVVGGGGNNNNNNNNSSSSSSTTTTTTTAAAAAIIIIIIIIQQQQQQQQQEEEEEEEEELLLLLLLLFFFFFFFFFFFKKKKKKKKKRRRRRRRRRRRIIIIIIIISSSSSSEEEEEEEEEQQQQQQQQQFFFFFFFFFFFTTTTTTTAAAAAMMMMMMMMFFFFFFFFFFFRRRRRRRRRRRRRRRRRRRRRRKKKKKKKKKAAAAAFFFFFFFFFFFLLLLLLLLHHHHHHHHHHWWWWWWWWWWWWWWYYYYYYYYYYYYTTTTTTTGGGGEEEEEEEEEGGGGMMMMMMMMDDDDDDDDEEEEEEEEEMMMMMMMMEEEEEEEEEFFFFFFFFFFFTTTTTTTEEEEEEEEEAAAAAEEEEEEEEESSSSSSNNNNNNNNMMMMMMMMNNNNNNNNDDDDDDDDLLLLLLLLIIIIIIIISSSSSSEEEEEEEEEYYYYYYYYYYYYQQQQQQQQQQQQQQQQQQYYYYYYYYYYYYQQQQQQQQQEEEEEEEEEAAAAATTTTTTTAAAAAEEEEEEEEEDDDDDDDDDDDDDDDDVVVVVVVDDDDDDDDGGGGYYYYYYYYYYYYAAAAAEEEEEEEEEGGGGEEEEEEEEEAAAAAGGGGEEEEEEEEETTTTTTTYYYYYYYYYYYYEEEEEEEEESSSSSSEEEEEEEEEQQQQQQQQQQ

SEQ ID NO: 140 - protein, 3503 aa, Gallus gallus
MMMMMMMMRRRRRRRRRRREEEEEEEEEIIIIIIIIVVVVVVVHHHHHHHHHHIIIIIIIIQQQQQQQQQAAAAAGGGGQQQQQQQQQCCCCCCGGGGNNNNNNNNQQQQQQQQQIIIIIIIIGGGGAAAAAKKKKKKKKKFFFFFFFFFFFWWWWWWWWWWWWWWEEEEEEEEEVVVVVVVIIIIIIIISSSSSSDDDDDDDDEEEEEEEEEHHHHHHHHHHGGGGIIIIIIIIDDDDDDDDPPPPPPPTTTTTTTGGGGSSSSSSYYYYYYYYYYYYHHHHHHHHHHGGGGDDDDDDDDSSSSSSDDDDDDDDLLLLLLLLQQQQQQQQQLLLLLLLLEEEEEEEEERRRRRRRRRRRIIIIIIIINNNNNNNNVVVVVVVYYYYYYYYYYYYYYYYYYYYYYYYNNNNNNNNEEEEEEEEEAAAAATTTTTTTGGGGNNNNNNNNKKKKKKKKKYYYYYYYYYYYYVVVVVVVPPPPPPPRRRRRRRRRRRAAAAAIIIIIIIILLLLLLLLVVVVVVVDDDDDDDDLLLLLLLLEEEEEEEEEPPPPPPPGGGGTTTTTTTMMMMMMMMDDDDDDDDSSSSSSVVVVVVVRRRRRRRRRRRSSSSSSGGGGPPPPPPPFFFFFFFFFFFGGGGQQQQQQQQQIIIIIIIIFFFFFFFFFFFRRRRRRRRRRRPPPPPPPDDDDDDDDNNNNNNNNFFFFFFFFFFFVVVVVVVFFFFFFFFFFFGGGGQQQQQQQQQSSSSSSGGGGAAAAAGGGGNNNNNNNNNNNNNNNNWWWWWWWWWWWWWWAAAAAKKKKKKKKKGGGGHHHHHHHHHHYYYYYYYYYYYYTTTTTTTEEEEEEEEEGGGGAAAAAEEEEEEEEELLLLLLLLVVVVVVVDDDDDDDDSSSSSSVVVVVVVLLLLLLLLDDDDDDDDVVVVVVVVVVVVVVRRRRRRRRRRRKKKKKKKKKEEEEEEEEESSSSSSEEEEEEEEESSSSSSCCCCCCDDDDDDDDCCCCCCLLLLLLLLQQQQQQQQQGGGGFFFFFFFFFFFQQQQQQQQQLLLLLLLLTTTTTTTHHHHHHHHHHSSSSSSLLLLLLLLGGGGGGGGGGGGTTTTTTTGGGGSSSSSSGGGGMMMMMMMMGGGGTTTTTTTLLLLLLLLLLLLLLLLIIIIIIIISSSSSSKKKKKKKKKIIIIIIIIRRRRRRRRRRREEEEEEEEEEEEEEEEEEYYYYYYYYYYYYPPPPPPPDDDDDDDDRRRRRRRRRRRIIIIIIIIMMMMMMMMNNNNNNNNTTTTTTTFFFFFFFFFFFSSSSSSVVVVVVVMMMMMMMMPPPPPPPSSSSSSPPPPPPPKKKKKKKKKVVVVVVVSSSSSSDDDDDDDDTTTTTTTVVVVVVVVVVVVVVEEEEEEEEEPPPPPPPYYYYYYYYYYYYNNNNNNNNAAAAATTTTTTTLLLLLLLLSSSSSSVVVVVVVHHHHHHHHHHQQQQQQQQQLLLLLLLLVVVVVVVEEEEEEEEENNNNNNNNTTTTTTTDDDDDDDDEEEEEEEEETTTTTTTYYYYYYYYYYYYCCCCCCIIIIIIIIDDDDDDDDNNNNNNNNEEEEEEEEEAAAAALLLLLLLLYYYYYYYYYYYYDDDDDDDDIIIIIIIICCCCCCFFFFFFFFFFFRRRRRRRRRRRTTTTTTTLLLLLLLLKKKKKKKKKLLLLLLLLTTTTTTTTTTTTTTPPPPPPPTTTTTTTYYYYYYYYYYYYGGGGDDDDDDDDLLLLLLLLNNNNNNNNHHHHHHHHHHLLLLLLLLVVVVVVVSSSSSSAAAAATTTTTTTMMMMMMMMSSSSSSGGGGVVVVVVVTTTTTTTTTTTTTTCCCCCCLLLLLLLLRRRRRRRRRRRFFFFFFFFFFFPPPPPPPGGGGQQQQQQQQQLLLLLLLLNNNNNNNNAAAAADDDDDDDDLLLLLLLLRRRRRRRRRRRKKKKKKKKKLLLLLLLLAAAAAVVVVVVVNNNNNNNNMMMMMMMMVVVVVVVPPPPPPPFFFFFFFFFFFPPPPPPPRRRRRRRRRRRLLLLLLLLHHHHHHHHHHFFFFFFFFFFFFFFFFFFFFFFMMMMMMMMPPPPPPPGGGGFFFFFFFFFFFAAAAAPPPPPPPLLLLLLLLTTTTTTTSSSSSSRRRRRRRRRRRGGGGSSSSSSQQQQQQQQQQQQQQQQQQYYYYYYYYYYYYRRRRRRRRRRRAAAAALLLLLLLLTTTTTTTVVVVVVVPPPPPPPEEEEEEEEELLLLLLLLTTTTTTTQQQQQQQQQQQQQQQQQQMMMMMMMMFFFFFFFFFFFDDDDDDDDSSSSSSKKKKKKKKKNNNNNNNNMMMMMMMMMMMMMMMMAAAAAAAAAACCCCCCDDDDDDDDPPPPPPPRRRRRRRRRRRHHHHHHHHHHGGGGRRRRRRRRRRRYYYYYYYYYYYYLLLLLLLLTTTTTTTVVVVVVVAAAAAAAAAAIIIIIIIIFFFFFFFFFFFRRRRRRRRRRRGGGGRRRRRRRRRRRMMMMMMMMSSSSSSMMMMMMMMKKKKKKKKKEEEEEEEEEVVVVVVVDDDDDDDDEEEEEEEEEQQQQQQQQQMMMMMMMMLLLLLLLLNNNNNNNNVVVVVVVQQQQQQQQQNNNNNNNNKKKKKKKKKNNNNNNNNSSSSSSSSSSSSYYYYYYYYYYYYFFFFFFFFFFFVVVVVVVEEEEEEEEEWWWWWWWWWWWWWWIIIIIIIIPPPPPPPNNNNNNNNNNNNNNNNVVVVVVVKKKKKKKKKTTTTTTTAAAAAVVVVVVVCCCCCCDDDDDDDDIIIIIIIIPPPPPPPPPPPPPPRRRRRRRRRRRGGGGLLLLLLLLKKKKKKKKKMMMMMMMMSSSSSSAAAAATTTTTTTFFFFFFFFFFFIIIIIIIIGGGGNNNNNNNNSSSSSSTTTTTTTAAAAAIIIIIIIIQQQQQQQQQEEEEEEEEELLLLLLLLFFFFFFFFFFFKKKKKKKKKRRRRRRRRRRRIIIIIIIISSSSSSEEEEEEEEEQQQQQQQQQFFFFFFFFFFFTTTTTTTAAAAAMMMMMMMMFFFFFFFFFFFRRRRRRRRRRRRRRRRRRRRRRKKKKKKKKKAAAAAFFFFFFFFFFFLLLLLLLLHHHHHHHHHHWWWWWWWWWWWWWWYYYYYYYYYYYYTTTTTTTGGGGEEEEEEEEEGGGGMMMMMMMMDDDDDDDDEEEEEEEEEMMMMMMMMEEEEEEEEEFFFFFFFFFFFTTTTTTTEEEEEEEEEAAAAAEEEEEEEEESSSSSSNNNNNNNNMMMMMMMMNNNNNNNNDDDDDDDDLLLLLLLLVVVVVVVSSSSSSEEEEEEEEEYYYYYYYYYYYYQQQQQQQQQQQQQQQQQQYYYYYYYYYYYYQQQQQQQQQDDDDDDDDAAAAATTTTTTTAAAAADDDDDDDDEEEEEEEEEQQQQQQQQQGGGGEEEEEEEEEFFFFFFFFFFFEEEEEEEEEEEEEEEEEEEEEEEEEEEGGGGEEEEEEEEEEEEEEEEEEDDDDDDDDEEEEEEEEEAAAAAA

SEQ ID NO: 141 - protein, 3495 aa, Glomerella cingulata
MMMMMMMMRRRRRRRRRRREEEEEEEEEIIIIIIIIVVVVVVVHHHHHHHHHHLLLLLLLLQQQQQQQQQTTTTTTTGGGGQQQQQQQQQCCCCCCGGGGNNNNNNNNQQQQQQQQQIIIIIIIIGGGGAAAAAAAAAAFFFFFFFFFFFWWWWWWWWWWWWWWQQQQQQQQQNNNNNNNNIIIIIIIISSSSSSGGGGEEEEEEEEEHHHHHHHHHHGGGGLLLLLLLLDDDDDDDDSSSSSSNNNNNNNNGGGGVVVVVVVYYYYYYYYYYYYNNNNNNNNGGGGTTTTTTTSSSSSSEEEEEEEEELLLLLLLLQQQQQQQQQLLLLLLLLEEEEEEEEERRRRRRRRRRRMMMMMMMMSSSSSSVVVVVVVYYYYYYYYYYYYFFFFFFFFFFFNNNNNNNNEEEEEEEEEAAAAASSSSSSGGGGNNNNNNNNKKKKKKKKKYYYYYYYYYYYYVVVVVVVPPPPPPPRRRRRRRRRRRAAAAAVVVVVVVLLLLLLLLVVVVVVVDDDDDDDDLLLLLLLLEEEEEEEEEPPPPPPPGGGGTTTTTTTMMMMMMMMDDDDDDDDAAAAAVVVVVVVRRRRRRRRRRRAAAAAGGGGPPPPPPPFFFFFFFFFFFGGGGQQQQQQQQQLLLLLLLLFFFFFFFFFFFRRRRRRRRRRRPPPPPPPDDDDDDDDNNNNNNNNFFFFFFFFFFFVVVVVVVFFFFFFFFFFFGGGGQQQQQQQQQSSSSSSGGGGAAAAAGGGGNNNNNNNNNNNNNNNNWWWWWWWWWWWWWWAAAAAKKKKKKKKKGGGGHHHHHHHHHHYYYYYYYYYYYYTTTTTTTEEEEEEEEEGGGGAAAAAEEEEEEEEELLLLLLLLVVVVVVVDDDDDDDDQQQQQQQQQVVVVVVVLLLLLLLLDDDDDDDDVVVVVVVVVVVVVVRRRRRRRRRRRRRRRRRRRRRREEEEEEEEEAAAAAEEEEEEEEEGGGGCCCCCCDDDDDDDDCCCCCCLLLLLLLLQQQQQQQQQGGGGFFFFFFFFFFFQQQQQQQQQIIIIIIIITTTTTTTHHHHHHHHHHSSSSSSLLLLLLLLGGGGGGGGGGGGTTTTTTTGGGGAAAAAGGGGMMMMMMMMGGGGTTTTTTTLLLLLLLLLLLLLLLLIIIIIIIISSSSSSKKKKKKKKKIIIIIIIIRRRRRRRRRRREEEEEEEEEEEEEEEEEEFFFFFFFFFFFPPPPPPPDDDDDDDDRRRRRRRRRRRMMMMMMMMMMMMMMMMAAAAATTTTTTTFFFFFFFFFFFSSSSSSVVVVVVVVVVVVVVPPPPPPPSSSSSSPPPPPPPKKKKKKKKKVVVVVVVSSSSSSDDDDDDDDTTTTTTTVVVVVVVVVVVVVVEEEEEEEEEPPPPPPPYYYYYYYYYYYYNNNNNNNNAAAAATTTTTTTLLLLLLLLSSSSSSVVVVVVVHHHHHHHHHHQQQQQQQQQLLLLLLLLVVVVVVVEEEEEEEEENNNNNNNNSSSSSSDDDDDDDDEEEEEEEEETTTTTTTFFFFFFFFFFFCCCCCCIIIIIIIIDDDDDDDDNNNNNNNNEEEEEEEEEAAAAALLLLLLLLYYYYYYYYYYYYDDDDDDDDIIIIIIIICCCCCCMMMMMMMMRRRRRRRRRRRTTTTTTTLLLLLLLLKKKKKKKKKLLLLLLLLSSSSSSNNNNNNNNPPPPPPPSSSSSSYYYYYYYYYYYYGGGGDDDDDDDDLLLLLLLLNNNNNNNNHHHHHHHHHHLLLLLLLLVVVVVVVSSSSSSAAAAAVVVVVVVMMMMMMMMSSSSSSGGGGVVVVVVVTTTTTTTTTTTTTTCCCCCCLLLLLLLLRRRRRRRRRRRFFFFFFFFFFFPPPPPPPGGGGQQQQQQQQQLLLLLLLLNNNNNNNNSSSSSSDDDDDDDDLLLLLLLLRRRRRRRRRRRKKKKKKKKKLLLLLLLLAAAAAVVVVVVVNNNNNNNNMMMMMMMMVVVVVVVPPPPPPPFFFFFFFFFFFPPPPPPPRRRRRRRRRRRLLLLLLLLHHHHHHHHHHFFFFFFFFFFFFFFFFFFFFFFMMMMMMMMVVVVVVVGGGGFFFFFFFFFFFAAAAAPPPPPPPLLLLLLLLTTTTTTTSSSSSSRRRRRRRRRRRGGGGAAAAAHHHHHHHHHHSSSSSSFFFFFFFFFFFRRRRRRRRRRRAAAAAVVVVVVVSSSSSSVVVVVVVPPPPPPPEEEEEEEEELLLLLLLLTTTTTTTQQQQQQQQQQQQQQQQQQMMMMMMMMFFFFFFFFFFFDDDDDDDDPPPPPPPKKKKKKKKKNNNNNNNNMMMMMMMMMMMMMMMMAAAAAAAAAASSSSSSDDDDDDDDFFFFFFFFFFFRRRRRRRRRRRNNNNNNNNGGGGRRRRRRRRRRRYYYYYYYYYYYYLLLLLLLLTTTTTTTCCCCCCSSSSSSAAAAAIIIIIIIIFFFFFFFFFFFRRRRRRRRRRRGGGGKKKKKKKKKVVVVVVVAAAAAMMMMMMMMKKKKKKKKKDDDDDDDDVVVVVVVEEEEEEEEEDDDDDDDDQQQQQQQQQMMMMMMMMRRRRRRRRRRRNNNNNNNNVVVVVVVQQQQQQQQQNNNNNNNNKKKKKKKKKNNNNNNNNSSSSSSSSSSSSYYYYYYYYYYYYFFFFFFFFFFFVVVVVVVEEEEEEEEEWWWWWWWWWWWWWWIIIIIIIIPPPPPPPNNNNNNNNNNNNNNNNVVVVVVVQQQQQQQQQTTTTTTTAAAAALLLLLLLLCCCCCCSSSSSSIIIIIIIIPPPPPPPPPPPPPPRRRRRRRRRRRGGGGLLLLLLLLKKKKKKKKKMMMMMMMMSSSSSSSSSSSSTTTTTTTFFFFFFFFFFFVVVVVVVGGGGNNNNNNNNAAAAATTTTTTTAAAAAIIIIIIIIQQQQQQQQQEEEEEEEEELLLLLLLLFFFFFFFFFFFKKKKKKKKKRRRRRRRRRRRVVVVVVVGGGGEEEEEEEEEQQQQQQQQQFFFFFFFFFFFTTTTTTTAAAAAMMMMMMMMFFFFFFFFFFFRRRRRRRRRRRRRRRRRRRRRRKKKKKKKKKAAAAAFFFFFFFFFFFLLLLLLLLHHHHHHHHHHWWWWWWWWWWWWWWYYYYYYYYYYYYTTTTTTTGGGGEEEEEEEEEGGGGMMMMMMMMDDDDDDDDEEEEEEEEEMMMMMMMMEEEEEEEEEFFFFFFFFFFFTTTTTTTEEEEEEEEEAAAAAEEEEEEEEESSSSSSNNNNNNNNMMMMMMMMNNNNNNNNDDDDDDDDLLLLLLLLVVVVVVVSSSSSSEEEEEEEEEYYYYYYYYYYYYQQQQQQQQQQQQQQQQQQYYYYYYYYYYYYQQQQQQQQQDDDDDDDDAAAAAGGGGVVVVVVVDDDDDDDDEEEEEEEEEEEEEEEEEEEEEEEEEEEEEEEEEEEEEEEEEEEEEYYYYYYYYYYYYEEEEEEEEEEEEEEEEEEEEEEEEEEEAAAAAPPPPPPPLLLLLLLLEEEEEEEEEEEEEEEEEEEEEEEEEEEVVVVVVVV

SEQ ID NO: 142 - protein, 3498 aa, Glomerella graminicola
MMMMMMMMRRRRRRRRRRREEEEEEEEEIIIIIIIIVVVVVVVHHHHHHHHHHLLLLLLLLQQQQQQQQQTTTTTTTGGGGQQQQQQQQQCCCCCCGGGGNNNNNNNNQQQQQQQQQIIIIIIIIGGGGAAAAAAAAAAFFFFFFFFFFFWWWWWWWWWWWWWWQQQQQQQQQNNNNNNNNIIIIIIIISSSSSSGGGGEEEEEEEEEHHHHHHHHHHGGGGLLLLLLLLDDDDDDDDSSSSSSNNNNNNNNGGGGVVVVVVVYYYYYYYYYYYYNNNNNNNNGGGGTTTTTTTSSSSSSEEEEEEEEELLLLLLLLQQQQQQQQQLLLLLLLLEEEEEEEEERRRRRRRRRRRMMMMMMMMSSSSSSVVVVVVVYYYYYYYYYYYYFFFFFFFFFFFNNNNNNNNEEEEEEEEEAAAAASSSSSSGGGGNNNNNNNNKKKKKKKKKYYYYYYYYYYYYVVVVVVVPPPPPPPRRRRRRRRRRRAAAAAVVVVVVVLLLLLLLLVVVVVVVDDDDDDDDLLLLLLLLEEEEEEEEEPPPPPPPGGGGTTTTTTTMMMMMMMMDDDDDDDDAAAAAVVVVVVVRRRRRRRRRRRAAAAAGGGGPPPPPPPFFFFFFFFFFFGGGGQQQQQQQQQLLLLLLLLFFFFFFFFFFFRRRRRRRRRRRPPPPPPPDDDDDDDDNNNNNNNNFFFFFFFFFFFVVVVVVVFFFFFFFFFFFGGGGQQQQQQQQQSSSSSSGGGGAAAAAGGGGNNNNNNNNNNNNNNNNWWWWWWWWWWWWWWAAAAAKKKKKKKKKGGGGHHHHHHHHHHYYYYYYYYYYYYTTTTTTTEEEEEEEEEGGGGAAAAAEEEEEEEEELLLLLLLLVVVVVVVDDDDDDDDQQQQQQQQQVVVVVVVLLLLLLLLDDDDDDDDVVVVVVVVVVVVVVRRRRRRRRRRRRRRRRRRRRRREEEEEEEEEAAAAAEEEEEEEEEGGGGCCCCCCDDDDDDDDCCCCCCLLLLLLLLQQQQQQQQQGGGGFFFFFFFFFFFQQQQQQQQQIIIIIIIITTTTTTTHHHHHHHHHHSSSSSSLLLLLLLLGGGGGGGGGGGGTTTTTTTGGGGAAAAAGGGGMMMMMMMMGGGGTTTTTTTLLLLLLLLLLLLLLLLIIIIIIIISSSSSSKKKKKKKKKIIIIIIIIRRRRRRRRRRREEEEEEEEEEEEEEEEEEFFFFFFFFFFFPPPPPPPDDDDDDDDRRRRRRRRRRRMMMMMMMMMMMMMMMMAAAAATTTTTTTFFFFFFFFFFFSSSSSSVVVVVVVVVVVVVVPPPPPPPSSSSSSPPPPPPPKKKKKKKKKVVVVVVVSSSSSSDDDDDDDDTTTTTTTVVVVVVVVVVVVVVEEEEEEEEEPPPPPPPYYYYYYYYYYYYNNNNNNNNAAAAATTTTTTTLLLLLLLLSSSSSSVVVVVVVHHHHHHHHHHQQQQQQQQQLLLLLLLLVVVVVVVEEEEEEEEENNNNNNNNSSSSSSDDDDDDDDEEEEEEEEETTTTTTTFFFFFFFFFFFCCCCCCIIIIIIIIDDDDDDDDNNNNNNNNEEEEEEEEEAAAAALLLLLLLLYYYYYYYYYYYYDDDDDDDDIIIIIIIICCCCCCMMMMMMMMRRRRRRRRRRRTTTTTTTLLLLLLLLKKKKKKKKKLLLLLLLLSSSSSSNNNNNNNNPPPPPPPSSSSSSYYYYYYYYYYYYGGGGDDDDDDDDLLLLLLLLNNNNNNNNHHHHHHHHHHLLLLLLLLVVVVVVVSSSSSSAAAAAVVVVVVVMMMMMMMMSSSSSSGGGGVVVVVVVTTTTTTTTTTTTTTCCCCCCLLLLLLLLRRRRRRRRRRRFFFFFFFFFFFPPPPPPPGGGGQQQQQQQQQLLLLLLLLNNNNNNNNSSSSSSDDDDDDDDLLLLLLLLRRRRRRRRRRRKKKKKKKKKLLLLLLLLAAAAAVVVVVVVNNNNNNNNMMMMMMMMVVVVVVVPPPPPPPFFFFFFFFFFFPPPPPPPRRRRRRRRRRRLLLLLLLLHHHHHHHHHHFFFFFFFFFFFFFFFFFFFFFFMMMMMMMMVVVVVVVGGGGFFFFFFFFFFFAAAAAPPPPPPPLLLLLLLLTTTTTTTSSSSSSRRRRRRRRRRRGGGGAAAAAHHHHHHHHHHSSSSSSFFFFFFFFFFFRRRRRRRRRRRAAAAAVVVVVVVSSSSSSVVVVVVVPPPPPPPEEEEEEEEELLLLLLLLTTTTTTTQQQQQQQQQQQQQQQQQQMMMMMMMMFFFFFFFFFFFDDDDDDDDPPPPPPPKKKKKKKKKNNNNNNNNMMMMMMMMMMMMMMMMAAAAAAAAAASSSSSSDDDDDDDDFFFFFFFFFFFRRRRRRRRRRRNNNNNNNNGGGGRRRRRRRRRRRYYYYYYYYYYYYLLLLLLLLTTTTTTTCCCCCCSSSSSSAAAAAIIIIIIIIFFFFFFFFFFFRRRRRRRRRRRGGGGKKKKKKKKKVVVVVVVAAAAAMMMMMMMMKKKKKKKKKDDDDDDDDVVVVVVVEEEEEEEEEDDDDDDDDQQQQQQQQQMMMMMMMMRRRRRRRRRRRNNNNNNNNVVVVVVVLLLLLLLLNNNNNNNNKKKKKKKKKNNNNNNNNSSSSSSSSSSSSYYYYYYYYYYYYFFFFFFFFFFFVVVVVVVEEEEEEEEEWWWWWWWWWWWWWWIIIIIIIIPPPPPPPNNNNNNNNNNNNNNNNVVVVVVVQQQQQQQQQTTTTTTTAAAAALLLLLLLLCCCCCCSSSSSSIIIIIIIIPPPPPPPPPPPPPPRRRRRRRRRRRGGGGLLLLLLLLKKKKKKKKKMMMMMMMMSSSSSSFFFFFFFFFFFTTTTTTTFFFFFFFFFFFVVVVVVVGGGGNNNNNNNNSSSSSSTTTTTTTAAAAAIIIIIIIIQQQQQQQQQEEEEEEEEELLLLLLLLFFFFFFFFFFFKKKKKKKKKRRRRRRRRRRRVVVVVVVGGGGEEEEEEEEEQQQQQQQQQFFFFFFFFFFFTTTTTTTAAAAAMMMMMMMMFFFFFFFFFFFRRRRRRRRRRRRRRRRRRRRRRKKKKKKKKKAAAAAFFFFFFFFFFFLLLLLLLLHHHHHHHHHHWWWWWWWWWWWWWWYYYYYYYYYYYYTTTTTTTGGGGEEEEEEEEEGGGGMMMMMMMMDDDDDDDDEEEEEEEEEMMMMMMMMEEEEEEEEEFFFFFFFFFFFTTTTTTTEEEEEEEEEAAAAAEEEEEEEEESSSSSSNNNNNNNNMMMMMMMMNNNNNNNNDDDDDDDDLLLLLLLLVVVVVVVSSSSSSEEEEEEEEEYYYYYYYYYYYYQQQQQQQQQQQQQQQQQQYYYYYYYYYYYYQQQQQQQQQDDDDDDDDAAAAAGGGGVVVVVVVDDDDDDDDEEEEEEEEEEEEEEEEEEEEEEEEEEEEEEEEEEEEEEEEEEEEEYYYYYYYYYYYYEEEEEEEEEDDDDDDDDDDDDDDDDAAAAAPPPPPPPLLLLLLLLEEEEEEEEEEEEEEEEEEEEEEEEEEEVVVVVVVV

SEQ ID NO: 143 - protein, 3470 aa, Daucus carota
MMMMMMMMRRRRRRRRRRREEEEEEEEEIIIIIIIILLLLLLLLHHHHHHHHHHIIIIIIIIQQQQQQQQQGGGGGGGGQQQQQQQQQCCCCCCGGGGNNNNNNNNQQQQQQQQQIIIIIIIIGGGGSSSSSSKKKKKKKKKFFFFFFFFFFFWWWWWWWWWWWWWWEEEEEEEEEVVVVVVVVVVVVVVCCCCCCDDDDDDDDEEEEEEEEEHHHHHHHHHHGGGGIIIIIIIIDDDDDDDDPPPPPPPTTTTTTTGGGGQQQQQQQQQVVVVVVVLLLLLLLLSSSSSSEEEEEEEEESSSSSSDDDDDDDDLLLLLLLLQQQQQQQQQLLLLLLLLDDDDDDDDRRRRRRRRRRRIIIIIIIINNNNNNNNVVVVVVVYYYYYYYYYYYYYYYYYYYYYYYYNNNNNNNNEEEEEEEEEAAAAASSSSSSGGGGGGGGRRRRRRRRRRRYYYYYYYYYYYYVVVVVVVPPPPPPPRRRRRRRRRRRAAAAAVVVVVVVLLLLLLLLMMMMMMMMDDDDDDDDLLLLLLLLEEEEEEEEEPPPPPPPGGGGTTTTTTTMMMMMMMMDDDDDDDDSSSSSSVVVVVVVKKKKKKKKKTTTTTTTGGGGPPPPPPPHHHHHHHHHHGGGGQQQQQQQQQIIIIIIIIFFFFFFFFFFFRRRRRRRRRRRPPPPPPPDDDDDDDDNNNNNNNNFFFFFFFFFFFIIIIIIIIFFFFFFFFFFFGGGGQQQQQQQQQSSSSSSGGGGAAAAAGGGGNNNNNNNNNNNNNNNNWWWWWWWWWWWWWWAAAAAKKKKKKKKKGGGGHHHHHHHHHHYYYYYYYYYYYYTTTTTTTEEEEEEEEEGGGGAAAAAEEEEEEEEELLLLLLLLIIIIIIIIDDDDDDDDSSSSSSVVVVVVVLLLLLLLLDDDDDDDDVVVVVVVVVVVVVVRRRRRRRRRRRKKKKKKKKKEEEEEEEEEAAAAAEEEEEEEEENNNNNNNNCCCCCCEEEEEEEEECCCCCCLLLLLLLLQQQQQQQQQGGGGFFFFFFFFFFFQQQQQQQQQVVVVVVVCCCCCCHHHHHHHHHHSSSSSSLLLLLLLLGGGGGGGGGGGGTTTTTTTGGGGSSSSSSGGGGMMMMMMMMGGGGTTTTTTTLLLLLLLLLLLLLLLLIIIIIIIISSSSSSKKKKKKKKKIIIIIIIIRRRRRRRRRRREEEEEEEEEEEEEEEEEEYYYYYYYYYYYYPPPPPPPDDDDDDDDRRRRRRRRRRRMMMMMMMMMMMMMMMMLLLLLLLLTTTTTTTFFFFFFFFFFFSSSSSSVVVVVVVFFFFFFFFFFFPPPPPPPSSSSSSPPPPPPPKKKKKKKKKVVVVVVVSSSSSSDDDDDDDDTTTTTTTVVVVVVVVVVVVVVEEEEEEEEEPPPPPPPYYYYYYYYYYYYNNNNNNNNAAAAATTTTTTTLLLLLLLLSSSSSSGGGGHHHHHHHHHHQQQQQQQQQLLLLLLLLVVVVVVVEEEEEEEEENNNNNNNNAAAAADDDDDDDDEEEEEEEEECCCCCCMMMMMMMMVVVVVVVLLLLLLLLDDDDDDDDNNNNNNNNEEEEEEEEEAAAAALLLLLLLLYYYYYYYYYYYYDDDDDDDDIIIIIIIICCCCCCFFFFFFFFFFFRRRRRRRRRRRTTTTTTTLLLLLLLLKKKKKKKKKLLLLLLLLSSSSSSTTTTTTTPPPPPPPSSSSSSFFFFFFFFFFFGGGGDDDDDDDDLLLLLLLLNNNNNNNNHHHHHHHHHHLLLLLLLLIIIIIIIISSSSSSGGGGTTTTTTTMMMMMMMMSSSSSSGGGGVVVVVVVTTTTTTTCCCCCCCCCCCCLLLLLLLLRRRRRRRRRRRFFFFFFFFFFFPPPPPPPGGGGQQQQQQQQQLLLLLLLLNNNNNNNNSSSSSSDDDDDDDDLLLLLLLLRRRRRRRRRRRKKKKKKKKKLLLLLLLLAAAAAVVVVVVVNNNNNNNNLLLLLLLLIIIIIIIIPPPPPPPFFFFFFFFFFFPPPPPPPRRRRRRRRRRRLLLLLLLLHHHHHHHHHHFFFFFFFFFFFFFFFFFFFFFFMMMMMMMMVVVVVVVGGGGFFFFFFFFFFFAAAAAPPPPPPPLLLLLLLLTTTTTTTSSSSSSRRRRRRRRRRRGGGGSSSSSSQQQQQQQQQQQQQQQQQQYYYYYYYYYYYYRRRRRRRRRRRTTTTTTTLLLLLLLLTTTTTTTVVVVVVVPPPPPPPEEEEEEEEELLLLLLLLTTTTTTTQQQQQQQQQQQQQQQQQQMMMMMMMMWWWWWWWWWWWWWWDDDDDDDDSSSSSSKKKKKKKKKNNNNNNNNMMMMMMMMMMMMMMMMCCCCCCAAAAAAAAAADDDDDDDDPPPPPPPRRRRRRRRRRRHHHHHHHHHHGGGGRRRRRRRRRRRYYYYYYYYYYYYLLLLLLLLTTTTTTTAAAAASSSSSSAAAAAMMMMMMMMFFFFFFFFFFFRRRRRRRRRRRGGGGKKKKKKKKKMMMMMMMMSSSSSSTTTTTTTKKKKKKKKKEEEEEEEEEVVVVVVVDDDDDDDDEEEEEEEEEQQQQQQQQQIIIIIIIILLLLLLLLNNNNNNNNVVVVVVVQQQQQQQQQNNNNNNNNKKKKKKKKKNNNNNNNNSSSSSSSSSSSSYYYYYYYYYYYYFFFFFFFFFFFVVVVVVVEEEEEEEEEWWWWWWWWWWWWWWIIIIIIIIPPPPPPPNNNNNNNNNNNNNNNNVVVVVVVKKKKKKKKKSSSSSSSSSSSSVVVVVVVCCCCCCDDDDDDDDIIIIIIIIPPPPPPPPPPPPPPRRRRRRRRRRRGGGGLLLLLLLLSSSSSSMMMMMMMMSSSSSSSSSSSSTTTTTTTFFFFFFFFFFFIIIIIIIIGGGGNNNNNNNNSSSSSSTTTTTTTSSSSSSIIIIIIIIQQQQQQQQQEEEEEEEEEMMMMMMMMFFFFFFFFFFFRRRRRRRRRRRRRRRRRRRRRRVVVVVVVSSSSSSEEEEEEEEEQQQQQQQQQFFFFFFFFFFFTTTTTTTAAAAAMMMMMMMMFFFFFFFFFFFRRRRRRRRRRRPPPPPPPKKKKKKKKKAAAAAFFFFFFFFFFFLLLLLLLLHHHHHHHHHHWWWWWWWWWWWWWWYYYYYYYYYYYYTTTTTTTGGGGEEEEEEEEEGGGGMMMMMMMMDDDDDDDDEEEEEEEEEMMMMMMMMEEEEEEEEEFFFFFFFFFFFTTTTTTTEEEEEEEEEAAAAAEEEEEEEEESSSSSSNNNNNNNNMMMMMMMMNNNNNNNNDDDDDDDDLLLLLLLLVVVVVVVSSSSSSEEEEEEEEEYYYYYYYYYYYYQQQQQQQQQQQQQQQQQQYYYYYYYYYYYYQQQQQQQQQDDDDDDDDAAAAATTTTTTTAAAAAEEEEEEEEEEEEEEEEEEDDDDDDDDDDDDDDDDYYYYYYYYYYYYDDDDDDDDDDDDDDDDGGGGEEEEEEEEEGGGGSSSSSSTTTTTTTGGGGDDDDDDDDD

SEQ ID NO: 144 - protein, 3502 aa, Drosophila erecta
MMMMMMMMRRRRRRRRRRREEEEEEEEEIIIIIIIIVVVVVVVHHHHHHHHHHIIIIIIIIQQQQQQQQQAAAAAGGGGQQQQQQQQQCCCCCCGGGGNNNNNNNNQQQQQQQQQIIIIIIIIGGGGGGGGKKKKKKKKKFFFFFFFFFFFWWWWWWWWWWWWWWEEEEEEEEEVVVVVVVIIIIIIIISSSSSSDDDDDDDDEEEEEEEEEHHHHHHHHHHCCCCCCIIIIIIIIDDDDDDDDAAAAATTTTTTTGGGGTTTTTTTYYYYYYYYYYYYYYYYYYYYYYYYGGGGDDDDDDDDSSSSSSDDDDDDDDLLLLLLLLQQQQQQQQQLLLLLLLLEEEEEEEEERRRRRRRRRRRIIIIIIIINNNNNNNNVVVVVVVYYYYYYYYYYYYYYYYYYYYYYYYNNNNNNNNEEEEEEEEEAAAAATTTTTTTGGGGAAAAAKKKKKKKKKYYYYYYYYYYYYVVVVVVVPPPPPPPRRRRRRRRRRRAAAAAIIIIIIIILLLLLLLLVVVVVVVDDDDDDDDLLLLLLLLEEEEEEEEEPPPPPPPGGGGTTTTTTTMMMMMMMMDDDDDDDDSSSSSSVVVVVVVRRRRRRRRRRRSSSSSSGGGGRRRRRRRRRRRFFFFFFFFFFFGGGGQQQQQQQQQIIIIIIIIFFFFFFFFFFFRRRRRRRRRRRPPPPPPPDDDDDDDDNNNNNNNNFFFFFFFFFFFVVVVVVVFFFFFFFFFFFGGGGQQQQQQQQQSSSSSSGGGGAAAAAGGGGNNNNNNNNNNNNNNNNWWWWWWWWWWWWWWAAAAAKKKKKKKKKGGGGHHHHHHHHHHYYYYYYYYYYYYTTTTTTTEEEEEEEEEGGGGAAAAAEEEEEEEEELLLLLLLLVVVVVVVDDDDDDDDSSSSSSVVVVVVVLLLLLLLLDDDDDDDDVVVVVVVVVVVVVVRRRRRRRRRRRKKKKKKKKKEEEEEEEEESSSSSSEEEEEEEEEGGGGCCCCCCDDDDDDDDCCCCCCLLLLLLLLQQQQQQQQQGGGGFFFFFFFFFFFQQQQQQQQQLLLLLLLLTTTTTTTHHHHHHHHHHSSSSSSLLLLLLLLGGGGGGGGGGGGTTTTTTTGGGGSSSSSSGGGGMMMMMMMMGGGGTTTTTTTLLLLLLLLLLLLLLLLIIIIIIIISSSSSSKKKKKKKKKIIIIIIIIRRRRRRRRRRREEEEEEEEEEEEEEEEEEYYYYYYYYYYYYPPPPPPPDDDDDDDDRRRRRRRRRRRIIIIIIIIMMMMMMMMNNNNNNNNTTTTTTTFFFFFFFFFFFSSSSSSVVVVVVVVVVVVVVPPPPPPPSSSSSSPPPPPPPKKKKKKKKKVVVVVVVSSSSSSDDDDDDDDTTTTTTTVVVVVVVVVVVVVVEEEEEEEEEPPPPPPPYYYYYYYYYYYYNNNNNNNNAAAAATTTTTTTLLLLLLLLSSSSSSVVVVVVVHHHHHHHHHHQQQQQQQQQLLLLLLLLVVVVVVVEEEEEEEEENNNNNNNNTTTTTTTDDDDDDDDEEEEEEEEETTTTTTTYYYYYYYYYYYYCCCCCCIIIIIIIIDDDDDDDDNNNNNNNNEEEEEEEEEAAAAALLLLLLLLYYYYYYYYYYYYDDDDDDDDIIIIIIIICCCCCCFFFFFFFFFFFRRRRRRRRRRRTTTTTTTLLLLLLLLKKKKKKKKKLLLLLLLLTTTTTTTTTTTTTTPPPPPPPTTTTTTTYYYYYYYYYYYYGGGGDDDDDDDDLLLLLLLLNNNNNNNNHHHHHHHHHHLLLLLLLLVVVVVVVSSSSSSAAAAATTTTTTTMMMMMMMMSSSSSSGGGGVVVVVVVTTTTTTTTTTTTTTCCCCCCLLLLLLLLRRRRRRRRRRRFFFFFFFFFFFPPPPPPPGGGGQQQQQQQQQLLLLLLLLNNNNNNNNAAAAADDDDDDDDLLLLLLLLRRRRRRRRRRRKKKKKKKKKLLLLLLLLAAAAAVVVVVVVNNNNNNNNMMMMMMMMVVVVVVVPPPPPPPFFFFFFFFFFFPPPPPPPRRRRRRRRRRRLLLLLLLLHHHHHHHHHHFFFFFFFFFFFFFFFFFFFFFFMMMMMMMMPPPPPPPGGGGFFFFFFFFFFFAAAAAPPPPPPPLLLLLLLLTTTTTTTSSSSSSRRRRRRRRRRRGGGGSSSSSSQQQQQQQQQQQQQQQQQQYYYYYYYYYYYYRRRRRRRRRRRAAAAALLLLLLLLTTTTTTTVVVVVVVPPPPPPPEEEEEEEEELLLLLLLLTTTTTTTQQQQQQQQQQQQQQQQQQMMMMMMMMFFFFFFFFFFFDDDDDDDDAAAAAKKKKKKKKKNNNNNNNNMMMMMMMMMMMMMMMMAAAAAAAAAACCCCCCDDDDDDDDPPPPPPPRRRRRRRRRRRHHHHHHHHHHGGGGRRRRRRRRRRRYYYYYYYYYYYYLLLLLLLLTTTTTTTVVVVVVVAAAAAAAAAAIIIIIIIIFFFFFFFFFFFRRRRRRRRRRRGGGGRRRRRRRRRRRMMMMMMMMSSSSSSMMMMMMMMKKKKKKKKKEEEEEEEEEVVVVVVVDDDDDDDDEEEEEEEEEQQQQQQQQQMMMMMMMMLLLLLLLLNNNNNNNNIIIIIIIIQQQQQQQQQNNNNNNNNKKKKKKKKKNNNNNNNNSSSSSSSSSSSSFFFFFFFFFFFFFFFFFFFFFFVVVVVVVEEEEEEEEEWWWWWWWWWWWWWWIIIIIIIIPPPPPPPNNNNNNNNNNNNNNNNCCCCCCKKKKKKKKKTTTTTTTAAAAAVVVVVVVCCCCCCDDDDDDDDIIIIIIIIPPPPPPPPPPPPPPRRRRRRRRRRRGGGGLLLLLLLLKKKKKKKKKMMMMMMMMSSSSSSAAAAATTTTTTTFFFFFFFFFFFIIIIIIIIGGGGNNNNNNNNSSSSSSTTTTTTTAAAAAIIIIIIIIQQQQQQQQQEEEEEEEEELLLLLLLLFFFFFFFFFFFKKKKKKKKKRRRRRRRRRRRVVVVVVVSSSSSSEEEEEEEEEQQQQQQQQQFFFFFFFFFFFTTTTTTTAAAAAMMMMMMMMFFFFFFFFFFFRRRRRRRRRRRRRRRRRRRRRRKKKKKKKKKAAAAAFFFFFFFFFFFLLLLLLLLHHHHHHHHHHWWWWWWWWWWWWWWYYYYYYYYYYYYTTTTTTTGGGGEEEEEEEEEGGGGMMMMMMMMDDDDDDDDEEEEEEEEEMMMMMMMMEEEEEEEEEFFFFFFFFFFFTTTTTTTEEEEEEEEEAAAAAEEEEEEEEESSSSSSNNNNNNNNMMMMMMMMNNNNNNNNDDDDDDDDLLLLLLLLVVVVVVVSSSSSSEEEEEEEEEYYYYYYYYYYYYQQQQQQQQQQQQQQQQQQYYYYYYYYYYYYQQQQQQQQQEEEEEEEEEAAAAATTTTTTTAAAAADDDDDDDDEEEEEEEEEEEEEEEEEEGGGGEEEEEEEEEFFFFFFFFFFFDDDDDDDDEEEEEEEEEDDDDDDDDEEEEEEEEEEEEEEEEEEGGGGGGGGGGGGDDDDDDDDEEEEEEEEEE

SEQ ID NO: 145 - protein, 3496 aa, Drosophila melanogaster
MMMMMMMMRRRRRRRRRRREEEEEEEEEIIIIIIIIVVVVVVVHHHHHHHHHHIIIIIIIIQQQQQQQQQAAAAAGGGGQQQQQQQQQCCCCCCGGGGNNNNNNNNQQQQQQQQQIIIIIIIIGGGGGGGGKKKKKKKKKFFFFFFFFFFFWWWWWWWWWWWWWWEEEEEEEEEVVVVVVVIIIIIIIISSSSSSDDDDDDDDEEEEEEEEEHHHHHHHHHHCCCCCCIIIIIIIIDDDDDDDDAAAAATTTTTTTGGGGTTTTTTTYYYYYYYYYYYYYYYYYYYYYYYYGGGGDDDDDDDDSSSSSSDDDDDDDDLLLLLLLLQQQQQQQQQLLLLLLLLEEEEEEEEERRRRRRRRRRRIIIIIIIINNNNNNNNVVVVVVVYYYYYYYYYYYYYYYYYYYYYYYYNNNNNNNNEEEEEEEEEAAAAATTTTTTTGGGGAAAAAKKKKKKKKKYYYYYYYYYYYYVVVVVVVPPPPPPPRRRRRRRRRRRAAAAAIIIIIIIILLLLLLLLVVVVVVVDDDDDDDDLLLLLLLLEEEEEEEEEPPPPPPPGGGGTTTTTTTMMMMMMMMDDDDDDDDSSSSSSVVVVVVVRRRRRRRRRRRSSSSSSGGGGAAAAAFFFFFFFFFFFGGGGQQQQQQQQQIIIIIIIIFFFFFFFFFFFRRRRRRRRRRRPPPPPPPDDDDDDDDNNNNNNNNFFFFFFFFFFFVVVVVVVFFFFFFFFFFFGGGGQQQQQQQQQSSSSSSGGGGAAAAAGGGGNNNNNNNNNNNNNNNNWWWWWWWWWWWWWWAAAAAKKKKKKKKKGGGGHHHHHHHHHHYYYYYYYYYYYYTTTTTTTEEEEEEEEEGGGGAAAAAEEEEEEEEELLLLLLLLVVVVVVVDDDDDDDDSSSSSSVVVVVVVLLLLLLLLDDDDDDDDVVVVVVVVVVVVVVRRRRRRRRRRRKKKKKKKKKEEEEEEEEESSSSSSEEEEEEEEEGGGGCCCCCCDDDDDDDDCCCCCCLLLLLLLLQQQQQQQQQGGGGFFFFFFFFFFFQQQQQQQQQLLLLLLLLTTTTTTTHHHHHHHHHHSSSSSSLLLLLLLLGGGGGGGGGGGGTTTTTTTGGGGSSSSSSGGGGMMMMMMMMGGGGTTTTTTTLLLLLLLLLLLLLLLLIIIIIIIISSSSSSKKKKKKKKKIIIIIIIIRRRRRRRRRRREEEEEEEEEEEEEEEEEEYYYYYYYYYYYYPPPPPPPDDDDDDDDRRRRRRRRRRRIIIIIIIIMMMMMMMMNNNNNNNNTTTTTTTFFFFFFFFFFFSSSSSSVVVVVVVVVVVVVVPPPPPPPSSSSSSPPPPPPPKKKKKKKKKVVVVVVVSSSSSSDDDDDDDDTTTTTTTVVVVVVVVVVVVVVEEEEEEEEEPPPPPPPYYYYYYYYYYYYNNNNNNNNAAAAATTTTTTTLLLLLLLLSSSSSSVVVVVVVHHHHHHHHHHQQQQQQQQQLLLLLLLLVVVVVVVEEEEEEEEENNNNNNNNTTTTTTTDDDDDDDDEEEEEEEEETTTTTTTYYYYYYYYYYYYCCCCCCIIIIIIIIDDDDDDDDNNNNNNNNEEEEEEEEEAAAAALLLLLLLLYYYYYYYYYYYYDDDDDDDDIIIIIIIICCCCCCFFFFFFFFFFFRRRRRRRRRRRTTTTTTTLLLLLLLLKKKKKKKKKLLLLLLLLTTTTTTTTTTTTTTPPPPPPPTTTTTTTYYYYYYYYYYYYGGGGDDDDDDDDLLLLLLLLNNNNNNNNHHHHHHHHHHLLLLLLLLVVVVVVVSSSSSSAAAAATTTTTTTMMMMMMMMSSSSSSGGGGVVVVVVVTTTTTTTTTTTTTTCCCCCCLLLLLLLLRRRRRRRRRRRFFFFFFFFFFFPPPPPPPGGGGQQQQQQQQQLLLLLLLLNNNNNNNNAAAAADDDDDDDDLLLLLLLLRRRRRRRRRRRKKKKKKKKKLLLLLLLLAAAAAVVVVVVVNNNNNNNNMMMMMMMMVVVVVVVPPPPPPPFFFFFFFFFFFPPPPPPPRRRRRRRRRRRLLLLLLLLHHHHHHHHHHFFFFFFFFFFFFFFFFFFFFFFMMMMMMMMPPPPPPPGGGGFFFFFFFFFFFAAAAAPPPPPPPLLLLLLLLTTTTTTTSSSSSSRRRRRRRRRRRGGGGSSSSSSQQQQQQQQQQQQQQQQQQYYYYYYYYYYYYRRRRRRRRRRRAAAAALLLLLLLLTTTTTTTVVVVVVVPPPPPPPEEEEEEEEELLLLLLLLTTTTTTTQQQQQQQQQQQQQQQQQQMMMMMMMMFFFFFFFFFFFDDDDDDDDAAAAAKKKKKKKKKNNNNNNNNMMMMMMMMMMMMMMMMAAAAAAAAAACCCCCCDDDDDDDDPPPPPPPRRRRRRRRRRRHHHHHHHHHHGGGGRRRRRRRRRRRYYYYYYYYYYYYLLLLLLLLTTTTTTTVVVVVVVAAAAAAAAAAIIIIIIIIFFFFFFFFFFFRRRRRRRRRRRGGGGRRRRRRRRRRRMMMMMMMMSSSSSSMMMMMMMMKKKKKKKKKEEEEEEEEEVVVVVVVDDDDDDDDEEEEEEEEEQQQQQQQQQMMMMMMMMLLLLLLLLNNNNNNNNIIIIIIIIQQQQQQQQQNNNNNNNNKKKKKKKKKNNNNNNNNSSSSSSSSSSSSFFFFFFFFFFFFFFFFFFFFFFVVVVVVVEEEEEEEEEWWWWWWWWWWWWWWIIIIIIIIPPPPPPPNNNNNNNNNNNNNNNNCCCCCCKKKKKKKKKTTTTTTTAAAAAVVVVVVVCCCCCCDDDDDDDDIIIIIIIIPPPPPPPPPPPPPPRRRRRRRRRRRGGGGLLLLLLLLKKKKKKKKKMMMMMMMMSSSSSSAAAAATTTTTTTFFFFFFFFFFFIIIIIIIIGGGGNNNNNNNNSSSSSSTTTTTTTAAAAAIIIIIIIIQQQQQQQQQEEEEEEEEELLLLLLLLFFFFFFFFFFFKKKKKKKKKRRRRRRRRRRRVVVVVVVSSSSSSEEEEEEEEEQQQQQQQQQFFFFFFFFFFFTTTTTTTAAAAAMMMMMMMMFFFFFFFFFFFRRRRRRRRRRRRRRRRRRRRRRKKKKKKKKKAAAAAFFFFFFFFFFFLLLLLLLLHHHHHHHHHHWWWWWWWWWWWWWWYYYYYYYYYYYYTTTTTTTGGGGEEEEEEEEEGGGGMMMMMMMMDDDDDDDDEEEEEEEEEMMMMMMMMEEEEEEEEEFFFFFFFFFFFTTTTTTTEEEEEEEEEAAAAAEEEEEEEEESSSSSSNNNNNNNNMMMMMMMMNNNNNNNNDDDDDDDDLLLLLLLLVVVVVVVSSSSSSEEEEEEEEEYYYYYYYYYYYYQQQQQQQQQQQQQQQQQQYYYYYYYYYYYYQQQQQQQQQEEEEEEEEEAAAAATTTTTTTAAAAADDDDDDDDEEEEEEEEEEEEEEEEEEGGGGEEEEEEEEEFFFFFFFFFFFDDDDDDDDEEEEEEEEEDDDDDDDDEEEEEEEEEEEEEEEEEEGGGGGGGGGGGGDDDDDDDDEEEEEEEEEE

SEQ ID NO: 146 - protein, 3523 aa, Eleusine indica
MMMMMMMMRRRRRRRRRRREEEEEEEEEIIIIIIIILLLLLLLLHHHHHHHHHHIIIIIIIIQQQQQQQQQGGGGGGGGQQQQQQQQQCCCCCCGGGGNNNNNNNNQQQQQQQQQIIIIIIIIGGGGAAAAAKKKKKKKKKFFFFFFFFFFFWWWWWWWWWWWWWWEEEEEEEEEVVVVVVVVVVVVVVCCCCCCDDDDDDDDEEEEEEEEEHHHHHHHHHHGGGGIIIIIIIIDDDDDDDDPPPPPPPTTTTTTTGGGGRRRRRRRRRRRYYYYYYYYYYYYTTTTTTTGGGGTTTTTTTSSSSSSDDDDDDDDLLLLLLLLQQQQQQQQQLLLLLLLLEEEEEEEEERRRRRRRRRRRVVVVVVVNNNNNNNNVVVVVVVYYYYYYYYYYYYYYYYYYYYYYYYNNNNNNNNEEEEEEEEEAAAAASSSSSSCCCCCCGGGGRRRRRRRRRRRFFFFFFFFFFFVVVVVVVPPPPPPPRRRRRRRRRRRAAAAAVVVVVVVLLLLLLLLMMMMMMMMDDDDDDDDLLLLLLLLEEEEEEEEEPPPPPPPGGGGTTTTTTTMMMMMMMMDDDDDDDDSSSSSSVVVVVVVRRRRRRRRRRRTTTTTTTGGGGPPPPPPPYYYYYYYYYYYYGGGGQQQQQQQQQIIIIIIIIFFFFFFFFFFFRRRRRRRRRRRPPPPPPPDDDDDDDDNNNNNNNNFFFFFFFFFFFVVVVVVVFFFFFFFFFFFGGGGQQQQQQQQQSSSSSSGGGGAAAAAGGGGNNNNNNNNNNNNNNNNWWWWWWWWWWWWWWAAAAAKKKKKKKKKGGGGHHHHHHHHHHYYYYYYYYYYYYTTTTTTTEEEEEEEEEGGGGAAAAAEEEEEEEEELLLLLLLLIIIIIIIIDDDDDDDDSSSSSSVVVVVVVLLLLLLLLDDDDDDDDVVVVVVVVVVVVVVRRRRRRRRRRRKKKKKKKKKEEEEEEEEEAAAAAEEEEEEEEENNNNNNNNCCCCCCDDDDDDDDCCCCCCLLLLLLLLQQQQQQQQQGGGGFFFFFFFFFFFQQQQQQQQQVVVVVVVCCCCCCHHHHHHHHHHSSSSSSLLLLLLLLGGGGGGGGGGGGTTTTTTTGGGGSSSSSSGGGGMMMMMMMMGGGGTTTTTTTLLLLLLLLLLLLLLLLIIIIIIIISSSSSSKKKKKKKKKIIIIIIIIRRRRRRRRRRREEEEEEEEEEEEEEEEEEYYYYYYYYYYYYPPPPPPPDDDDDDDDRRRRRRRRRRRMMMMMMMMMMMMMMMMLLLLLLLLTTTTTTTFFFFFFFFFFFSSSSSSVVVVVVVFFFFFFFFFFFPPPPPPPSSSSSSPPPPPPPKKKKKKKKKVVVVVVVSSSSSSDDDDDDDDTTTTTTTVVVVVVVVVVVVVVEEEEEEEEEPPPPPPPYYYYYYYYYYYYNNNNNNNNAAAAATTTTTTTLLLLLLLLSSSSSSVVVVVVVHHHHHHHHHHQQQQQQQQQLLLLLLLLVVVVVVVEEEEEEEEENNNNNNNNAAAAADDDDDDDDEEEEEEEEECCCCCCMMMMMMMMVVVVVVVLLLLLLLLDDDDDDDDNNNNNNNNEEEEEEEEEAAAAALLLLLLLLYYYYYYYYYYYYDDDDDDDDIIIIIIIICCCCCCFFFFFFFFFFFRRRRRRRRRRRTTTTTTTLLLLLLLLKKKKKKKKKLLLLLLLLTTTTTTTTTTTTTTPPPPPPPSSSSSSFFFFFFFFFFFGGGGDDDDDDDDLLLLLLLLNNNNNNNNHHHHHHHHHHLLLLLLLLIIIIIIIISSSSSSAAAAATTTTTTTMMMMMMMMSSSSSSGGGGVVVVVVVTTTTTTTCCCCCCCCCCCCLLLLLLLLRRRRRRRRRRRFFFFFFFFFFFPPPPPPPGGGGQQQQQQQQQLLLLLLLLNNNNNNNNSSSSSSDDDDDDDDLLLLLLLLRRRRRRRRRRRKKKKKKKKKLLLLLLLLAAAAAVVVVVVVNNNNNNNNLLLLLLLLIIIIIIIIPPPPPPPFFFFFFFFFFFPPPPPPPRRRRRRRRRRRLLLLLLLLHHHHHHHHHHFFFFFFFFFFFFFFFFFFFFFFMMMMMMMMVVVVVVVGGGGFFFFFFFFFFFAAAAAPPPPPPPLLLLLLLLTTTTTTTSSSSSSRRRRRRRRRRRGGGGSSSSSSQQQQQQQQQQQQQQQQQQYYYYYYYYYYYYRRRRRRRRRRRAAAAALLLLLLLLTTTTTTTVVVVVVVPPPPPPPEEEEEEEEELLLLLLLLTTTTTTTQQQQQQQQQQQQQQQQQQMMMMMMMMWWWWWWWWWWWWWWDDDDDDDDAAAAAKKKKKKKKKNNNNNNNNMMMMMMMMMMMMMMMMCCCCCCAAAAAAAAAADDDDDDDDPPPPPPPRRRRRRRRRRRHHHHHHHHHHGGGGRRRRRRRRRRRYYYYYYYYYYYYLLLLLLLLTTTTTTTAAAAASSSSSSAAAAAMMMMMMMMFFFFFFFFFFFRRRRRRRRRRRGGGGKKKKKKKKKMMMMMMMMSSSSSSTTTTTTTKKKKKKKKKEEEEEEEEEVVVVVVVDDDDDDDDEEEEEEEEEQQQQQQQQQMMMMMMMMIIIIIIIINNNNNNNNVVVVVVVQQQQQQQQQNNNNNNNNKKKKKKKKKNNNNNNNNSSSSSSSSSSSSYYYYYYYYYYYYFFFFFFFFFFFVVVVVVVEEEEEEEEEWWWWWWWWWWWWWWIIIIIIIIPPPPPPPNNNNNNNNNNNNNNNNVVVVVVVKKKKKKKKKSSSSSSSSSSSSVVVVVVVCCCCCCDDDDDDDDIIIIIIIIPPPPPPPPPPPPPPRRRRRRRRRRRGGGGLLLLLLLLSSSSSSMMMMMMMMAAAAASSSSSSTTTTTTTFFFFFFFFFFFIIIIIIIIGGGGNNNNNNNNSSSSSSTTTTTTTSSSSSSIIIIIIIIQQQQQQQQQEEEEEEEEEMMMMMMMMFFFFFFFFFFFRRRRRRRRRRRRRRRRRRRRRRVVVVVVVSSSSSSEEEEEEEEEQQQQQQQQQFFFFFFFFFFFTTTTTTTAAAAAMMMMMMMMFFFFFFFFFFFRRRRRRRRRRRRRRRRRRRRRRKKKKKKKKKAAAAAFFFFFFFFFFFLLLLLLLLHHHHHHHHHHWWWWWWWWWWWWWWYYYYYYYYYYYYTTTTTTTGGGGEEEEEEEEEGGGGMMMMMMMMDDDDDDDDEEEEEEEEEMMMMMMMMEEEEEEEEEFFFFFFFFFFFTTTTTTTEEEEEEEEEAAAAAEEEEEEEEESSSSSSNNNNNNNNMMMMMMMMNNNNNNNNDDDDDDDDLLLLLLLLVVVVVVVSSSSSSEEEEEEEEEYYYYYYYYYYYYQQQQQQQQQQQQQQQQQQYYYYYYYYYYYYQQQQQQQQQDDDDDDDDAAAAATTTTTTTAAAAADDDDDDDDEEEEEEEEEDDDDDDDDGGGGEEEEEEEEEYYYYYYYYYYYYEEEEEEEEEDDDDDDDDEEEEEEEEELLLLLLLLDDDDDDDDGGGGQQQQQQQQQEEEEEEEEEEEEEEEEEEEEEEEEEEEDDDDDDDDMMMMMMMMM

SEQ ID NO: 147 - protein, 3499 aa, Emericella nidulans
MMMMMMMMRRRRRRRRRRREEEEEEEEEIIIIIIIIVVVVVVVHHHHHHHHHHLLLLLLLLQQQQQQQQQTTTTTTTGGGGQQQQQQQQQCCCCCCGGGGNNNNNNNNQQQQQQQQQVVVVVVVGGGGSSSSSSAAAAAFFFFFFFFFFFWWWWWWWWWWWWWWQQQQQQQQQTTTTTTTIIIIIIIISSSSSSGGGGEEEEEEEEEHHHHHHHHHHGGGGLLLLLLLLDDDDDDDDAAAAASSSSSSGGGGIIIIIIIIYYYYYYYYYYYYTTTTTTTGGGGDDDDDDDDSSSSSSDDDDDDDDLLLLLLLLQQQQQQQQQLLLLLLLLEEEEEEEEERRRRRRRRRRRMMMMMMMMNNNNNNNNVVVVVVVYYYYYYYYYYYYFFFFFFFFFFFNNNNNNNNEEEEEEEEEAAAAAGGGGGGGGNNNNNNNNKKKKKKKKKYYYYYYYYYYYYVVVVVVVPPPPPPPRRRRRRRRRRRAAAAAVVVVVVVLLLLLLLLIIIIIIIIDDDDDDDDLLLLLLLLEEEEEEEEEPPPPPPPGGGGTTTTTTTMMMMMMMMDDDDDDDDAAAAALLLLLLLLRRRRRRRRRRRSSSSSSGGGGPPPPPPPNNNNNNNNGGGGAAAAALLLLLLLLYYYYYYYYYYYYRRRRRRRRRRRPPPPPPPDDDDDDDDNNNNNNNNFFFFFFFFFFFIIIIIIIIYYYYYYYYYYYYGGGGQQQQQQQQQSSSSSSSSSSSSAAAAAGGGGNNNNNNNNNNNNNNNNCCCCCCAAAAAKKKKKKKKKGGGGHHHHHHHHHHYYYYYYYYYYYYTTTTTTTEEEEEEEEEGGGGAAAAAEEEEEEEEELLLLLLLLVVVVVVVDDDDDDDDQQQQQQQQQVVVVVVVIIIIIIIIDDDDDDDDVVVVVVVVVVVVVVRRRRRRRRRRRRRRRRRRRRRREEEEEEEEEAAAAAEEEEEEEEESSSSSSCCCCCCDDDDDDDDCCCCCCLLLLLLLLQQQQQQQQQAAAAAFFFFFFFFFFFQQQQQQQQQVVVVVVVTTTTTTTHHHHHHHHHHSSSSSSLLLLLLLLGGGGGGGGGGGGTTTTTTTGGGGSSSSSSGGGGMMMMMMMMGGGGTTTTTTTLLLLLLLLLLLLLLLLIIIIIIIISSSSSSKKKKKKKKKIIIIIIIIRRRRRRRRRRREEEEEEEEEEEEEEEEEEFFFFFFFFFFFPPPPPPPDDDDDDDDRRRRRRRRRRRMMMMMMMMMMMMMMMMAAAAATTTTTTTFFFFFFFFFFFSSSSSSVVVVVVVMMMMMMMMPPPPPPPSSSSSSPPPPPPPKKKKKKKKKVVVVVVVSSSSSSDDDDDDDDTTTTTTTVVVVVVVVVVVVVVEEEEEEEEEPPPPPPPYYYYYYYYYYYYNNNNNNNNAAAAATTTTTTTLLLLLLLLSSSSSSVVVVVVVHHHHHHHHHHQQQQQQQQQLLLLLLLLVVVVVVVEEEEEEEEEHHHHHHHHHHSSSSSSDDDDDDDDEEEEEEEEETTTTTTTFFFFFFFFFFFCCCCCCLLLLLLLLDDDDDDDDNNNNNNNNDDDDDDDDAAAAALLLLLLLLYYYYYYYYYYYYDDDDDDDDIIIIIIIICCCCCCIIIIIIIIRRRRRRRRRRRTTTTTTTLLLLLLLLKKKKKKKKKLLLLLLLLSSSSSSSSSSSSPPPPPPPSSSSSSYYYYYYYYYYYYGGGGDDDDDDDDLLLLLLLLNNNNNNNNHHHHHHHHHHLLLLLLLLVVVVVVVSSSSSSAAAAAVVVVVVVMMMMMMMMSSSSSSGGGGIIIIIIIITTTTTTTVVVVVVVSSSSSSLLLLLLLLRRRRRRRRRRRFFFFFFFFFFFPPPPPPPGGGGQQQQQQQQQLLLLLLLLNNNNNNNNSSSSSSDDDDDDDDLLLLLLLLRRRRRRRRRRRKKKKKKKKKLLLLLLLLAAAAAVVVVVVVNNNNNNNNMMMMMMMMVVVVVVVPPPPPPPFFFFFFFFFFFPPPPPPPRRRRRRRRRRRLLLLLLLLHHHHHHHHHHFFFFFFFFFFFFFFFFFFFFFFMMMMMMMMVVVVVVVGGGGFFFFFFFFFFFAAAAAPPPPPPPLLLLLLLLTTTTTTTSSSSSSRRRRRRRRRRRSSSSSSSSSSSSSSSSSSSSSSSSFFFFFFFFFFFRRRRRRRRRRRTTTTTTTIIIIIIIISSSSSSVVVVVVVPPPPPPPEEEEEEEEELLLLLLLLTTTTTTTQQQQQQQQQQQQQQQQQQMMMMMMMMFFFFFFFFFFFDDDDDDDDSSSSSSRRRRRRRRRRRNNNNNNNNMMMMMMMMMMMMMMMMTTTTTTTAAAAAAAAAANNNNNNNNYYYYYYYYYYYYQQQQQQQQQNNNNNNNNGGGGRRRRRRRRRRRFFFFFFFFFFFLLLLLLLLTTTTTTTCCCCCCSSSSSSTTTTTTTLLLLLLLLFFFFFFFFFFFRRRRRRRRRRRGGGGKKKKKKKKKVVVVVVVAAAAAMMMMMMMMKKKKKKKKKEEEEEEEEEVVVVVVVEEEEEEEEEDDDDDDDDQQQQQQQQQMMMMMMMMRRRRRRRRRRRNNNNNNNNMMMMMMMMQQQQQQQQQNNNNNNNNKKKKKKKKKYYYYYYYYYYYYSSSSSSSSSSSSYYYYYYYYYYYYFFFFFFFFFFFVVVVVVVEEEEEEEEEWWWWWWWWWWWWWWIIIIIIIIPPPPPPPNNNNNNNNNNNNNNNNVVVVVVVQQQQQQQQQTTTTTTTAAAAALLLLLLLLCCCCCCSSSSSSMMMMMMMMPPPPPPPPPPPPPPKKKKKKKKKGGGGLLLLLLLLKKKKKKKKKMMMMMMMMAAAAAAAAAATTTTTTTFFFFFFFFFFFVVVVVVVGGGGNNNNNNNNSSSSSSTTTTTTTSSSSSSVVVVVVVQQQQQQQQQEEEEEEEEELLLLLLLLFFFFFFFFFFFNNNNNNNNRRRRRRRRRRRVVVVVVVSSSSSSNNNNNNNNQQQQQQQQQFFFFFFFFFFFTTTTTTTAAAAAMMMMMMMMFFFFFFFFFFFRRRRRRRRRRRRRRRRRRRRRRKKKKKKKKKAAAAAFFFFFFFFFFFLLLLLLLLHHHHHHHHHHWWWWWWWWWWWWWWYYYYYYYYYYYYTTTTTTTGGGGEEEEEEEEEGGGGMMMMMMMMDDDDDDDDEEEEEEEEEMMMMMMMMEEEEEEEEEFFFFFFFFFFFTTTTTTTEEEEEEEEEAAAAAEEEEEEEEESSSSSSNNNNNNNNMMMMMMMMNNNNNNNNDDDDDDDDLLLLLLLLMMMMMMMMSSSSSSEEEEEEEEEYYYYYYYYYYYYQQQQQQQQQQQQQQQQQQYYYYYYYYYYYYQQQQQQQQQEEEEEEEEEAAAAATTTTTTTVVVVVVVSSSSSSDDDDDDDDGGGGEEEEEEEEEGGGGAAAAAYYYYYYYYYYYYDDDDDDDDAAAAAEEEEEEEEEEEEEEEEEEGGGGEEEEEEEEEAAAAAYYYYYYYYYYYYEEEEEEEEEQQQQQQQQQEEEEEEEEEEEEEEEEEEE

SEQ ID NO: 148 - protein, 3504 aa, Erysiphe pisi
MMMMMMMMRRRRRRRRRRREEEEEEEEEIIIIIIIIVVVVVVVHHHHHHHHHHLLLLLLLLQQQQQQQQQTTTTTTTGGGGQQQQQQQQQCCCCCCGGGGNNNNNNNNQQQQQQQQQIIIIIIIIGGGGAAAAAAAAAAFFFFFFFFFFFWWWWWWWWWWWWWWQQQQQQQQQTTTTTTTIIIIIIIISSSSSSGGGGEEEEEEEEEHHHHHHHHHHGGGGLLLLLLLLDDDDDDDDGGGGSSSSSSGGGGVVVVVVVYYYYYYYYYYYYNNNNNNNNGGGGTTTTTTTSSSSSSDDDDDDDDLLLLLLLLQQQQQQQQQLLLLLLLLEEEEEEEEERRRRRRRRRRRMMMMMMMMNNNNNNNNVVVVVVVYYYYYYYYYYYYFFFFFFFFFFFNNNNNNNNEEEEEEEEEAAAAASSSSSSGGGGNNNNNNNNKKKKKKKKKYYYYYYYYYYYYVVVVVVVPPPPPPPRRRRRRRRRRRAAAAAVVVVVVVLLLLLLLLVVVVVVVDDDDDDDDLLLLLLLLEEEEEEEEEPPPPPPPGGGGTTTTTTTMMMMMMMMDDDDDDDDAAAAAVVVVVVVRRRRRRRRRRRAAAAAGGGGPPPPPPPFFFFFFFFFFFGGGGQQQQQQQQQLLLLLLLLFFFFFFFFFFFRRRRRRRRRRRPPPPPPPDDDDDDDDNNNNNNNNFFFFFFFFFFFVVVVVVVFFFFFFFFFFFGGGGQQQQQQQQQSSSSSSGGGGAAAAAGGGGNNNNNNNNNNNNNNNNWWWWWWWWWWWWWWAAAAAKKKKKKKKKGGGGHHHHHHHHHHYYYYYYYYYYYYTTTTTTTEEEEEEEEEGGGGAAAAAEEEEEEEEELLLLLLLLVVVVVVVDDDDDDDDQQQQQQQQQVVVVVVVLLLLLLLLDDDDDDDDVVVVVVVVVVVVVVRRRRRRRRRRRRRRRRRRRRRREEEEEEEEEAAAAAEEEEEEEEEAAAAACCCCCCDDDDDDDDCCCCCCLLLLLLLLQQQQQQQQQGGGGFFFFFFFFFFFQQQQQQQQQIIIIIIIITTTTTTTHHHHHHHHHHSSSSSSLLLLLLLLGGGGGGGGGGGGTTTTTTTGGGGAAAAAGGGGMMMMMMMMGGGGTTTTTTTLLLLLLLLLLLLLLLLIIIIIIIISSSSSSKKKKKKKKKIIIIIIIIRRRRRRRRRRREEEEEEEEEEEEEEEEEEFFFFFFFFFFFPPPPPPPDDDDDDDDRRRRRRRRRRRMMMMMMMMMMMMMMMMAAAAATTTTTTTFFFFFFFFFFFSSSSSSVVVVVVVVVVVVVVPPPPPPPSSSSSSPPPPPPPKKKKKKKKKVVVVVVVSSSSSSDDDDDDDDTTTTTTTVVVVVVVVVVVVVVEEEEEEEEEPPPPPPPYYYYYYYYYYYYNNNNNNNNAAAAATTTTTTTLLLLLLLLSSSSSSVVVVVVVHHHHHHHHHHQQQQQQQQQLLLLLLLLVVVVVVVEEEEEEEEENNNNNNNNSSSSSSDDDDDDDDEEEEEEEEETTTTTTTFFFFFFFFFFFCCCCCCIIIIIIIIDDDDDDDDNNNNNNNNEEEEEEEEEAAAAALLLLLLLLYYYYYYYYYYYYEEEEEEEEEIIIIIIIICCCCCCMMMMMMMMRRRRRRRRRRRTTTTTTTLLLLLLLLKKKKKKKKKLLLLLLLLSSSSSSNNNNNNNNPPPPPPPSSSSSSYYYYYYYYYYYYGGGGDDDDDDDDLLLLLLLLNNNNNNNNHHHHHHHHHHLLLLLLLLVVVVVVVSSSSSSAAAAAVVVVVVVMMMMMMMMSSSSSSGGGGVVVVVVVTTTTTTTTTTTTTTCCCCCCLLLLLLLLRRRRRRRRRRRFFFFFFFFFFFPPPPPPPGGGGQQQQQQQQQLLLLLLLLNNNNNNNNSSSSSSDDDDDDDDLLLLLLLLRRRRRRRRRRRKKKKKKKKKLLLLLLLLAAAAAVVVVVVVNNNNNNNNMMMMMMMMVVVVVVVPPPPPPPFFFFFFFFFFFPPPPPPPRRRRRRRRRRRLLLLLLLLHHHHHHHHHHFFFFFFFFFFFFFFFFFFFFFFMMMMMMMMVVVVVVVGGGGFFFFFFFFFFFAAAAAPPPPPPPLLLLLLLLTTTTTTTSSSSSSRRRRRRRRRRRGGGGAAAAAHHHHHHHHHHSSSSSSFFFFFFFFFFFRRRRRRRRRRRAAAAAVVVVVVVTTTTTTTVVVVVVVPPPPPPPEEEEEEEEELLLLLLLLTTTTTTTQQQQQQQQQQQQQQQQQQMMMMMMMMYYYYYYYYYYYYDDDDDDDDPPPPPPPKKKKKKKKKNNNNNNNNMMMMMMMMMMMMMMMMAAAAAAAAAASSSSSSDDDDDDDDFFFFFFFFFFFRRRRRRRRRRRNNNNNNNNGGGGRRRRRRRRRRRYYYYYYYYYYYYLLLLLLLLTTTTTTTCCCCCCSSSSSSAAAAAIIIIIIIIFFFFFFFFFFFRRRRRRRRRRRGGGGKKKKKKKKKVVVVVVVSSSSSSMMMMMMMMKKKKKKKKKEEEEEEEEEVVVVVVVEEEEEEEEEDDDDDDDDQQQQQQQQQMMMMMMMMRRRRRRRRRRRNNNNNNNNVVVVVVVQQQQQQQQQNNNNNNNNKKKKKKKKKNNNNNNNNSSSSSSAAAAAYYYYYYYYYYYYFFFFFFFFFFFVVVVVVVEEEEEEEEEWWWWWWWWWWWWWWIIIIIIIIPPPPPPPNNNNNNNNNNNNNNNNVVVVVVVQQQQQQQQQTTTTTTTAAAAALLLLLLLLCCCCCCSSSSSSIIIIIIIIPPPPPPPPPPPPPPRRRRRRRRRRRGGGGLLLLLLLLKKKKKKKKKMMMMMMMMSSSSSSSSSSSSTTTTTTTFFFFFFFFFFFVVVVVVVGGGGNNNNNNNNSSSSSSTTTTTTTSSSSSSIIIIIIIIQQQQQQQQQEEEEEEEEELLLLLLLLFFFFFFFFFFFKKKKKKKKKRRRRRRRRRRRVVVVVVVGGGGDDDDDDDDQQQQQQQQQFFFFFFFFFFFTTTTTTTAAAAAMMMMMMMMFFFFFFFFFFFRRRRRRRRRRRRRRRRRRRRRRKKKKKKKKKAAAAAFFFFFFFFFFFLLLLLLLLHHHHHHHHHHWWWWWWWWWWWWWWYYYYYYYYYYYYTTTTTTTGGGGEEEEEEEEEGGGGMMMMMMMMDDDDDDDDEEEEEEEEEMMMMMMMMEEEEEEEEEFFFFFFFFFFFTTTTTTTEEEEEEEEEAAAAAEEEEEEEEESSSSSSNNNNNNNNMMMMMMMMNNNNNNNNDDDDDDDDLLLLLLLLVVVVVVVHHHHHHHHHHEEEEEEEEEYYYYYYYYYYYYQQQQQQQQQQQQQQQQQQYYYYYYYYYYYYQQQQQQQQQDDDDDDDDAAAAASSSSSSIIIIIIIISSSSSSEEEEEEEEEGGGGEEEEEEEEEEEEEEEEEEEEEEEEEEEYYYYYYYYYYYYEEEEEEEEEEEEEEEEEEEEEEEEEEEQQQQQQQQQQQQQQQQQQLLLLLLLLEEEEEEEEENNNNNNNNEEEEEEEEEEEEEEEEEEE

SEQ ID NO: 149 - protein, 3549 aa, Galactomyces geotrichum
MMMMMMMMRRRRRRRRRRREEEEEEEEEIIIIIIIIVVVVVVVSSSSSSIIIIIIIIQQQQQQQQQCCCCCCGGGGQQQQQQQQQAAAAAGGGGMMMMMMMMNNNNNNNNQQQQQQQQQVVVVVVVSSSSSSTTTTTTTAAAAAFFFFFFFFFFFWWWWWWWWWWWWWWSSSSSSTTTTTTTIIIIIIIITTTTTTTDDDDDDDDEEEEEEEEEHHHHHHHHHHGGGGLLLLLLLLDDDDDDDDAAAAADDDDDDDDGGGGHHHHHHHHHHLLLLLLLLRRRRRRRRRRRPPPPPPPDDDDDDDDAAAAASSSSSSSSSSSSLLLLLLLLEEEEEEEEESSSSSSDDDDDDDDRRRRRRRRRRRLLLLLLLLDDDDDDDDVVVVVVVFFFFFFFFFFFFFFFFFFFFFFNNNNNNNNEEEEEEEEEAAAAASSSSSSNNNNNNNNKKKKKKKKKKKKKKKKKKYYYYYYYYYYYYVVVVVVVPPPPPPPRRRRRRRRRRRAAAAAVVVVVVVAAAAAVVVVVVVDDDDDDDDLLLLLLLLEEEEEEEEEPPPPPPPAAAAATTTTTTTLLLLLLLLDDDDDDDDAAAAAIIIIIIIIRRRRRRRRRRRSSSSSSGGGGPPPPPPPLLLLLLLLGGGGHHHHHHHHHHIIIIIIIIYYYYYYYYYYYYRRRRRRRRRRRPPPPPPPDDDDDDDDNNNNNNNNLLLLLLLLIIIIIIIISSSSSSGGGGEEEEEEEEESSSSSSGGGGAAAAAGGGGNNNNNNNNNNNNNNNNWWWWWWWWWWWWWWAAAAAKKKKKKKKKGGGGFFFFFFFFFFFYYYYYYYYYYYYTTTTTTTEEEEEEEEEGGGGAAAAAEEEEEEEEELLLLLLLLMMMMMMMMDDDDDDDDSSSSSSVVVVVVVMMMMMMMMDDDDDDDDIIIIIIIIIIIIIIIIRRRRRRRRRRRRRRRRRRRRRREEEEEEEEEAAAAAEEEEEEEEEQQQQQQQQQSSSSSSEEEEEEEEESSSSSSLLLLLLLLQQQQQQQQQGGGGFFFFFFFFFFFQQQQQQQQQLLLLLLLLAAAAAHHHHHHHHHHSSSSSSLLLLLLLLGGGGGGGGGGGGTTTTTTTGGGGSSSSSSGGGGLLLLLLLLGGGGTTTTTTTLLLLLLLLLLLLLLLLLLLLLLLLTTTTTTTKKKKKKKKKIIIIIIIIRRRRRRRRRRREEEEEEEEEEEEEEEEEEYYYYYYYYYYYYPPPPPPPDDDDDDDDRRRRRRRRRRRMMMMMMMMLLLLLLLLSSSSSSTTTTTTTYYYYYYYYYYYYSSSSSSVVVVVVVLLLLLLLLPPPPPPPSSSSSSPPPPPPPKKKKKKKKKVVVVVVVSSSSSSDDDDDDDDTTTTTTTVVVVVVVTTTTTTTEEEEEEEEEPPPPPPPYYYYYYYYYYYYNNNNNNNNAAAAAVVVVVVVLLLLLLLLSSSSSSFFFFFFFFFFFHHHHHHHHHHQQQQQQQQQLLLLLLLLIIIIIIIIDDDDDDDDNNNNNNNNAAAAADDDDDDDDAAAAATTTTTTTYYYYYYYYYYYYCCCCCCLLLLLLLLDDDDDDDDNNNNNNNNEEEEEEEEEAAAAALLLLLLLLYYYYYYYYYYYYDDDDDDDDIIIIIIIICCCCCCEEEEEEEEEKKKKKKKKKTTTTTTTLLLLLLLLKKKKKKKKKIIIIIIIINNNNNNNNRRRRRRRRRRRPPPPPPPSSSSSSHHHHHHHHHHQQQQQQQQQDDDDDDDDLLLLLLLLNNNNNNNNSSSSSSLLLLLLLLIIIIIIIIAAAAALLLLLLLLVVVVVVVMMMMMMMMSSSSSSGGGGVVVVVVVTTTTTTTTTTTTTTGGGGLLLLLLLLRRRRRRRRRRRYYYYYYYYYYYYPPPPPPPGGGGQQQQQQQQQLLLLLLLLNNNNNNNNGGGGDDDDDDDDLLLLLLLLRRRRRRRRRRRKKKKKKKKKLLLLLLLLAAAAAVVVVVVVNNNNNNNNLLLLLLLLVVVVVVVPPPPPPPFFFFFFFFFFFPPPPPPPRRRRRRRRRRRLLLLLLLLHHHHHHHHHHFFFFFFFFFFFFFFFFFFFFFFTTTTTTTTTTTTTTGGGGFFFFFFFFFFFAAAAAPPPPPPPLLLLLLLLFFFFFFFFFFFAAAAAKKKKKKKKKNNNNNNNNSSSSSSRRRRRRRRRRRAAAAAFFFFFFFFFFFHHHHHHHHHHNNNNNNNNLLLLLLLLTTTTTTTVVVVVVVPPPPPPPEEEEEEEEELLLLLLLLTTTTTTTQQQQQQQQQQQQQQQQQQLLLLLLLLFFFFFFFFFFFNNNNNNNNPPPPPPPAAAAANNNNNNNNVVVVVVVMMMMMMMMAAAAAAAAAACCCCCCNNNNNNNNPPPPPPPYYYYYYYYYYYYHHHHHHHHHHGGGGRRRRRRRRRRRYYYYYYYYYYYYLLLLLLLLTTTTTTTIIIIIIIISSSSSSTTTTTTTIIIIIIIIFFFFFFFFFFFRRRRRRRRRRRGGGGQQQQQQQQQVVVVVVVAAAAAMMMMMMMMKKKKKKKKKEEEEEEEEEVVVVVVVEEEEEEEEEDDDDDDDDAAAAAIIIIIIIIHHHHHHHHHHTTTTTTTAAAAARRRRRRRRRRRTTTTTTTKKKKKKKKKYYYYYYYYYYYYSSSSSSPPPPPPPYYYYYYYYYYYYFFFFFFFFFFFVVVVVVVEEEEEEEEEWWWWWWWWWWWWWWIIIIIIIIPPPPPPPNNNNNNNNNNNNNNNNVVVVVVVQQQQQQQQQTTTTTTTSSSSSSVVVVVVVCCCCCCNNNNNNNNVVVVVVVPPPPPPPPPPPPPPKKKKKKKKKGGGGLLLLLLLLTTTTTTTTTTTTTTSSSSSSAAAAATTTTTTTFFFFFFFFFFFIIIIIIIIAAAAANNNNNNNNSSSSSSTTTTTTTAAAAAVVVVVVVQQQQQQQQQEEEEEEEEELLLLLLLLFFFFFFFFFFFEEEEEEEEERRRRRRRRRRRTTTTTTTAAAAANNNNNNNNQQQQQQQQQFFFFFFFFFFFSSSSSSVVVVVVVMMMMMMMMFFFFFFFFFFFKKKKKKKKKRRRRRRRRRRRKKKKKKKKKGGGGFFFFFFFFFFFLLLLLLLLHHHHHHHHHHWWWWWWWWWWWWWWYYYYYYYYYYYYTTTTTTTGGGGEEEEEEEEEGGGGMMMMMMMMEEEEEEEEEPPPPPPPVVVVVVVEEEEEEEEEFFFFFFFFFFFSSSSSSEEEEEEEEEAAAAAQQQQQQQQQSSSSSSDDDDDDDDLLLLLLLLEEEEEEEEEDDDDDDDDLLLLLLLLIIIIIIIILLLLLLLLEEEEEEEEEYYYYYYYYYYYYQQQQQQQQQQQQQQQQQQYYYYYYYYYYYYQQQQQQQQQNNNNNNNNAAAAAGGGGVVVVVVVDDDDDDDDEEEEEEEEEDDDDDDDDEEEEEEEEEEEEEEEEEELLLLLLLLMMMMMMMMDDDDDDDDHHHHHHHHHHEEEEEEEEEEEEEEEEEEYYYYYYYYYYYYAAAAADDDDDDDDEEEEEEEEEGGGGVVVVVVVEEEEEEEEEDDDDDDDDFFFFFFFFFFFNNNNNNNNN

SEQ ID NO: 150 - protein, 3573 aa, Homarus americanus
MMMMMMMMRRRRRRRRRRREEEEEEEEEIIIIIIIIVVVVVVVHHHHHHHHHHIIIIIIIIQQQQQQQQQTTTTTTTGGGGQQQQQQQQQCCCCCCGGGGNNNNNNNNQQQQQQQQQIIIIIIIIGGGGTTTTTTTKKKKKKKKKFFFFFFFFFFFWWWWWWWWWWWWWWEEEEEEEEEIIIIIIIIIIIIIIIISSSSSSDDDDDDDDEEEEEEEEEHHHHHHHHHHGGGGIIIIIIIIQQQQQQQQQPPPPPPPTTTTTTTGGGGEEEEEEEEEYYYYYYYYYYYYTTTTTTTTTTTTTTGGGGVVVVVVVEEEEEEEEEKKKKKKKKKDDDDDDDDLLLLLLLLMMMMMMMMEEEEEEEEELLLLLLLLQQQQQQQQQLLLLLLLLEEEEEEEEERRRRRRRRRRRIIIIIIIINNNNNNNNVVVVVVVYYYYYYYYYYYYYYYYYYYYYYYYNNNNNNNNEEEEEEEEEGGGGNNNNNNNNQQQQQQQQQGGGGKKKKKKKKKYYYYYYYYYYYYVVVVVVVPPPPPPPRRRRRRRRRRRAAAAAVVVVVVVLLLLLLLLVVVVVVVDDDDDDDDLLLLLLLLEEEEEEEEEPPPPPPPGGGGTTTTTTTMMMMMMMMDDDDDDDDSSSSSSVVVVVVVRRRRRRRRRRRAAAAAGGGGPPPPPPPHHHHHHHHHHGGGGQQQQQQQQQLLLLLLLLFFFFFFFFFFFKKKKKKKKKPPPPPPPDDDDDDDDSSSSSSFFFFFFFFFFFVVVVVVVFFFFFFFFFFFGGGGQQQQQQQQQSSSSSSGGGGAAAAAGGGGNNNNNNNNNNNNNNNNWWWWWWWWWWWWWWAAAAAKKKKKKKKKGGGGHHHHHHHHHHYYYYYYYYYYYYTTTTTTTEEEEEEEEEGGGGAAAAAEEEEEEEEELLLLLLLLVVVVVVVDDDDDDDDSSSSSSVVVVVVVLLLLLLLLDDDDDDDDVVVVVVVVVVVVVVRRRRRRRRRRRKKKKKKKKKKKKKKKKKKSSSSSSEEEEEEEEEKKKKKKKKKCCCCCCDDDDDDDDCCCCCCLLLLLLLLQQQQQQQQQGGGGFFFFFFFFFFFQQQQQQQQQLLLLLLLLTTTTTTTHHHHHHHHHHSSSSSSLLLLLLLLGGGGGGGGVVVVVVVTTTTTTTGGGGSSSSSSGGGGMMMMMMMMGGGGTTTTTTTLLLLLLLLLLLLLLLLVVVVVVVSSSSSSKKKKKKKKKIIIIIIIILLLLLLLLEEEEEEEEEEEEEEEEEEFFFFFFFFFFFPPPPPPPDDDDDDDDRRRRRRRRRRRIIIIIIIIMMMMMMMMVVVVVVVTTTTTTTFFFFFFFFFFFSSSSSSVVVVVVVVVVVVVVPPPPPPPSSSSSSPPPPPPPKKKKKKKKKVVVVVVVSSSSSSDDDDDDDDTTTTTTTVVVVVVVVVVVVVVEEEEEEEEEPPPPPPPYYYYYYYYYYYYNNNNNNNNAAAAATTTTTTTLLLLLLLLSSSSSSIIIIIIIIHHHHHHHHHHQQQQQQQQQLLLLLLLLVVVVVVVEEEEEEEEENNNNNNNNTTTTTTTDDDDDDDDEEEEEEEEETTTTTTTYYYYYYYYYYYYCCCCCCIIIIIIIIDDDDDDDDNNNNNNNNEEEEEEEEEAAAAALLLLLLLLYYYYYYYYYYYYDDDDDDDDIIIIIIIICCCCCCFFFFFFFFFFFRRRRRRRRRRRTTTTTTTLLLLLLLLKKKKKKKKKLLLLLLLLQQQQQQQQQNNNNNNNNPPPPPPPTTTTTTTYYYYYYYYYYYYGGGGDDDDDDDDLLLLLLLLNNNNNNNNHHHHHHHHHHLLLLLLLLVVVVVVVSSSSSSLLLLLLLLTTTTTTTMMMMMMMMSSSSSSGGGGVVVVVVVTTTTTTTTTTTTTTCCCCCCLLLLLLLLRRRRRRRRRRRFFFFFFFFFFFPPPPPPPGGGGQQQQQQQQQLLLLLLLLNNNNNNNNAAAAADDDDDDDDLLLLLLLLRRRRRRRRRRRKKKKKKKKKLLLLLLLLAAAAAVVVVVVVNNNNNNNNMMMMMMMMVVVVVVVPPPPPPPFFFFFFFFFFFPPPPPPPRRRRRRRRRRRLLLLLLLLHHHHHHHHHHFFFFFFFFFFFFFFFFFFFFFFMMMMMMMMPPPPPPPGGGGFFFFFFFFFFFAAAAAPPPPPPPLLLLLLLLTTTTTTTAAAAARRRRRRRRRRRGGGGSSSSSSQQQQQQQQQQQQQQQQQQYYYYYYYYYYYYRRRRRRRRRRRAAAAALLLLLLLLTTTTTTTVVVVVVVPPPPPPPEEEEEEEEELLLLLLLLTTTTTTTQQQQQQQQQQQQQQQQQQMMMMMMMMFFFFFFFFFFFDDDDDDDDAAAAAKKKKKKKKKNNNNNNNNMMMMMMMMMMMMMMMMAAAAAAAAAACCCCCCDDDDDDDDPPPPPPPRRRRRRRRRRRHHHHHHHHHHGGGGRRRRRRRRRRRYYYYYYYYYYYYLLLLLLLLTTTTTTTVVVVVVVAAAAAAAAAAIIIIIIIIFFFFFFFFFFFRRRRRRRRRRRGGGGRRRRRRRRRRRMMMMMMMMSSSSSSMMMMMMMMRRRRRRRRRRREEEEEEEEEVVVVVVVDDDDDDDDDDDDDDDDQQQQQQQQQMMMMMMMMYYYYYYYYYYYYNNNNNNNNIIIIIIIIQQQQQQQQQNNNNNNNNKKKKKKKKKNNNNNNNNSSSSSSSSSSSSFFFFFFFFFFFFFFFFFFFFFFVVVVVVVEEEEEEEEEWWWWWWWWWWWWWWIIIIIIIIPPPPPPPNNNNNNNNNNNNNNNNVVVVVVVKKKKKKKKKTTTTTTTAAAAAVVVVVVVCCCCCCDDDDDDDDIIIIIIIIPPPPPPPPPPPPPPRRRRRRRRRRRGGGGLLLLLLLLKKKKKKKKKMMMMMMMMSSSSSSAAAAATTTTTTTFFFFFFFFFFFIIIIIIIIGGGGNNNNNNNNSSSSSSTTTTTTTAAAAAIIIIIIIIQQQQQQQQQEEEEEEEEELLLLLLLLFFFFFFFFFFFKKKKKKKKKRRRRRRRRRRRVVVVVVVSSSSSSEEEEEEEEEQQQQQQQQQFFFFFFFFFFFTTTTTTTAAAAAMMMMMMMMFFFFFFFFFFFRRRRRRRRRRRRRRRRRRRRRRKKKKKKKKKAAAAAFFFFFFFFFFFLLLLLLLLHHHHHHHHHHWWWWWWWWWWWWWWYYYYYYYYYYYYTTTTTTTGGGGEEEEEEEEEGGGGMMMMMMMMDDDDDDDDEEEEEEEEEMMMMMMMMEEEEEEEEEFFFFFFFFFFFTTTTTTTEEEEEEEEEAAAAAEEEEEEEEESSSSSSNNNNNNNNMMMMMMMMNNNNNNNNDDDDDDDDLLLLLLLLVVVVVVVSSSSSSEEEEEEEEEYYYYYYYYYYYYQQQQQQQQQQQQQQQQQQYYYYYYYYYYYYQQQQQQQQQEEEEEEEEEAAAAATTTTTTTAAAAADDDDDDDDDDDDDDDDEEEEEEEEEAAAAAEEEEEEEEEFFFFFFFFFFFEEEEEEEEEEEEEEEEEEEEEEEEEEEGGGGEEEEEEEEEVVVVVVVEEEEEEEEEGGGGEEEEEEEEEYYYYYYYYYYYYDDDDDDDDD

SEQ ID NO: 151 - protein, 3496 aa, Homo sapiens
MMMMMMMMRRRRRRRRRRREEEEEEEEEIIIIIIIIVVVVVVVHHHHHHHHHHLLLLLLLLQQQQQQQQQAAAAAGGGGQQQQQQQQQCCCCCCGGGGNNNNNNNNQQQQQQQQQIIIIIIIIGGGGAAAAAKKKKKKKKKFFFFFFFFFFFWWWWWWWWWWWWWWEEEEEEEEEVVVVVVVIIIIIIIISSSSSSDDDDDDDDEEEEEEEEEHHHHHHHHHHGGGGIIIIIIIIDDDDDDDDPPPPPPPTTTTTTTGGGGTTTTTTTYYYYYYYYYYYYHHHHHHHHHHGGGGDDDDDDDDSSSSSSDDDDDDDDLLLLLLLLQQQQQQQQQLLLLLLLLEEEEEEEEERRRRRRRRRRRIIIIIIIINNNNNNNNVVVVVVVYYYYYYYYYYYYYYYYYYYYYYYYNNNNNNNNEEEEEEEEEAAAAATTTTTTTGGGGGGGGKKKKKKKKKYYYYYYYYYYYYVVVVVVVPPPPPPPRRRRRRRRRRRAAAAAVVVVVVVLLLLLLLLVVVVVVVDDDDDDDDLLLLLLLLEEEEEEEEEPPPPPPPGGGGTTTTTTTMMMMMMMMDDDDDDDDSSSSSSVVVVVVVRRRRRRRRRRRSSSSSSGGGGPPPPPPPFFFFFFFFFFFGGGGQQQQQQQQQIIIIIIIIFFFFFFFFFFFRRRRRRRRRRRPPPPPPPDDDDDDDDNNNNNNNNFFFFFFFFFFFVVVVVVVFFFFFFFFFFFGGGGQQQQQQQQQSSSSSSGGGGAAAAAGGGGNNNNNNNNNNNNNNNNWWWWWWWWWWWWWWAAAAAKKKKKKKKKGGGGHHHHHHHHHHYYYYYYYYYYYYTTTTTTTEEEEEEEEEGGGGAAAAAEEEEEEEEELLLLLLLLVVVVVVVDDDDDDDDSSSSSSVVVVVVVLLLLLLLLDDDDDDDDVVVVVVVVVVVVVVRRRRRRRRRRRKKKKKKKKKEEEEEEEEEAAAAAEEEEEEEEESSSSSSCCCCCCDDDDDDDDCCCCCCLLLLLLLLQQQQQQQQQGGGGFFFFFFFFFFFQQQQQQQQQLLLLLLLLTTTTTTTHHHHHHHHHHSSSSSSLLLLLLLLGGGGGGGGGGGGTTTTTTTGGGGSSSSSSGGGGMMMMMMMMGGGGTTTTTTTLLLLLLLLLLLLLLLLIIIIIIIISSSSSSKKKKKKKKKIIIIIIIIRRRRRRRRRRREEEEEEEEEEEEEEEEEEYYYYYYYYYYYYPPPPPPPDDDDDDDDRRRRRRRRRRRIIIIIIIIMMMMMMMMNNNNNNNNTTTTTTTFFFFFFFFFFFSSSSSSVVVVVVVVVVVVVVPPPPPPPSSSSSSPPPPPPPKKKKKKKKKVVVVVVVSSSSSSDDDDDDDDTTTTTTTVVVVVVVVVVVVVVEEEEEEEEEPPPPPPPYYYYYYYYYYYYNNNNNNNNAAAAATTTTTTTLLLLLLLLSSSSSSVVVVVVVHHHHHHHHHHQQQQQQQQQLLLLLLLLVVVVVVVEEEEEEEEENNNNNNNNTTTTTTTDDDDDDDDEEEEEEEEETTTTTTTYYYYYYYYYYYYCCCCCCIIIIIIIIDDDDDDDDNNNNNNNNEEEEEEEEEAAAAALLLLLLLLYYYYYYYYYYYYDDDDDDDDIIIIIIIICCCCCCFFFFFFFFFFFRRRRRRRRRRRTTTTTTTLLLLLLLLKKKKKKKKKLLLLLLLLTTTTTTTTTTTTTTPPPPPPPTTTTTTTYYYYYYYYYYYYGGGGDDDDDDDDLLLLLLLLNNNNNNNNHHHHHHHHHHLLLLLLLLVVVVVVVSSSSSSAAAAATTTTTTTMMMMMMMMSSSSSSGGGGVVVVVVVTTTTTTTTTTTTTTCCCCCCLLLLLLLLRRRRRRRRRRRFFFFFFFFFFFPPPPPPPGGGGQQQQQQQQQLLLLLLLLNNNNNNNNAAAAADDDDDDDDLLLLLLLLRRRRRRRRRRRKKKKKKKKKLLLLLLLLAAAAAVVVVVVVNNNNNNNNMMMMMMMMVVVVVVVPPPPPPPFFFFFFFFFFFPPPPPPPRRRRRRRRRRRLLLLLLLLHHHHHHHHHHFFFFFFFFFFFFFFFFFFFFFFMMMMMMMMPPPPPPPGGGGFFFFFFFFFFFAAAAAPPPPPPPLLLLLLLLTTTTTTTSSSSSSRRRRRRRRRRRGGGGSSSSSSQQQQQQQQQQQQQQQQQQYYYYYYYYYYYYRRRRRRRRRRRAAAAALLLLLLLLTTTTTTTVVVVVVVPPPPPPPEEEEEEEEELLLLLLLLTTTTTTTQQQQQQQQQQQQQQQQQQMMMMMMMMFFFFFFFFFFFDDDDDDDDAAAAAKKKKKKKKKNNNNNNNNMMMMMMMMMMMMMMMMAAAAAAAAAACCCCCCDDDDDDDDPPPPPPPRRRRRRRRRRRHHHHHHHHHHGGGGRRRRRRRRRRRYYYYYYYYYYYYLLLLLLLLTTTTTTTVVVVVVVAAAAAAAAAAVVVVVVVFFFFFFFFFFFRRRRRRRRRRRGGGGRRRRRRRRRRRMMMMMMMMSSSSSSMMMMMMMMKKKKKKKKKEEEEEEEEEVVVVVVVDDDDDDDDEEEEEEEEEQQQQQQQQQMMMMMMMMLLLLLLLLNNNNNNNNVVVVVVVQQQQQQQQQNNNNNNNNKKKKKKKKKNNNNNNNNSSSSSSSSSSSSYYYYYYYYYYYYFFFFFFFFFFFVVVVVVVEEEEEEEEEWWWWWWWWWWWWWWIIIIIIIIPPPPPPPNNNNNNNNNNNNNNNNVVVVVVVKKKKKKKKKTTTTTTTAAAAAVVVVVVVCCCCCCDDDDDDDDIIIIIIIIPPPPPPPPPPPPPPRRRRRRRRRRRGGGGLLLLLLLLKKKKKKKKKMMMMMMMMSSSSSSAAAAATTTTTTTFFFFFFFFFFFIIIIIIIIGGGGNNNNNNNNSSSSSSTTTTTTTAAAAAIIIIIIIIQQQQQQQQQEEEEEEEEELLLLLLLLFFFFFFFFFFFKKKKKKKKKRRRRRRRRRRRIIIIIIIISSSSSSEEEEEEEEEQQQQQQQQQFFFFFFFFFFFTTTTTTTAAAAAMMMMMMMMFFFFFFFFFFFRRRRRRRRRRRRRRRRRRRRRRKKKKKKKKKAAAAAFFFFFFFFFFFLLLLLLLLHHHHHHHHHHWWWWWWWWWWWWWWYYYYYYYYYYYYTTTTTTTGGGGEEEEEEEEEGGGGMMMMMMMMDDDDDDDDEEEEEEEEEMMMMMMMMEEEEEEEEEFFFFFFFFFFFTTTTTTTEEEEEEEEEAAAAAEEEEEEEEESSSSSSNNNNNNNNMMMMMMMMNNNNNNNNDDDDDDDDLLLLLLLLVVVVVVVSSSSSSEEEEEEEEEYYYYYYYYYYYYQQQQQQQQQQQQQQQQQQYYYYYYYYYYYYQQQQQQQQQDDDDDDDDAAAAATTTTTTTAAAAAEEEEEEEEEEEEEEEEEEEEEEEEEEEGGGGEEEEEEEEEFFFFFFFFFFFEEEEEEEEEEEEEEEEEEEEEEEEEEEAAAAAEEEEEEEEEEEEEEEEEEEEEEEEEEEVVVVVVVAAAAAA

SEQ ID NO: 152 - protein, 3523 aa, Solanum tuberosum
MMMMMMMMRRRRRRRRRRREEEEEEEEEIIIIIIIILLLLLLLLHHHHHHHHHHIIIIIIIIQQQQQQQQQGGGGGGGGQQQQQQQQQCCCCCCGGGGNNNNNNNNQQQQQQQQQIIIIIIIIGGGGAAAAAKKKKKKKKKFFFFFFFFFFFWWWWWWWWWWWWWWEEEEEEEEEVVVVVVVVVVVVVVCCCCCCAAAAAEEEEEEEEEHHHHHHHHHHGGGGIIIIIIIIDDDDDDDDSSSSSSTTTTTTTGGGGRRRRRRRRRRRYYYYYYYYYYYYEEEEEEEEEGGGGDDDDDDDDNNNNNNNNVVVVVVVLLLLLLLLQQQQQQQQQLLLLLLLLEEEEEEEEERRRRRRRRRRRVVVVVVVNNNNNNNNVVVVVVVYYYYYYYYYYYYYYYYYYYYYYYYNNNNNNNNEEEEEEEEEAAAAASSSSSSCCCCCCGGGGRRRRRRRRRRRFFFFFFFFFFFVVVVVVVPPPPPPPRRRRRRRRRRRAAAAAVVVVVVVLLLLLLLLMMMMMMMMDDDDDDDDLLLLLLLLEEEEEEEEEPPPPPPPGGGGTTTTTTTMMMMMMMMDDDDDDDDSSSSSSLLLLLLLLRRRRRRRRRRRSSSSSSGGGGTTTTTTTYYYYYYYYYYYYGGGGQQQQQQQQQIIIIIIIIFFFFFFFFFFFRRRRRRRRRRRPPPPPPPDDDDDDDDNNNNNNNNFFFFFFFFFFFVVVVVVVFFFFFFFFFFFGGGGQQQQQQQQQSSSSSSGGGGAAAAAGGGGNNNNNNNNNNNNNNNNWWWWWWWWWWWWWWAAAAAKKKKKKKKKGGGGHHHHHHHHHHYYYYYYYYYYYYTTTTTTTEEEEEEEEEGGGGAAAAAEEEEEEEEELLLLLLLLIIIIIIIIDDDDDDDDSSSSSSVVVVVVVLLLLLLLLDDDDDDDDVVVVVVVVVVVVVVRRRRRRRRRRRKKKKKKKKKEEEEEEEEEAAAAAEEEEEEEEENNNNNNNNCCCCCCDDDDDDDDCCCCCCLLLLLLLLQQQQQQQQQGGGGFFFFFFFFFFFQQQQQQQQQVVVVVVVCCCCCCHHHHHHHHHHSSSSSSLLLLLLLLGGGGGGGGGGGGTTTTTTTGGGGSSSSSSGGGGMMMMMMMMGGGGTTTTTTTLLLLLLLLLLLLLLLLIIIIIIIISSSSSSKKKKKKKKKIIIIIIIIRRRRRRRRRRREEEEEEEEEEEEEEEEEEYYYYYYYYYYYYPPPPPPPDDDDDDDDRRRRRRRRRRRMMMMMMMMMMMMMMMMLLLLLLLLTTTTTTTFFFFFFFFFFFSSSSSSVVVVVVVFFFFFFFFFFFPPPPPPPSSSSSSPPPPPPPKKKKKKKKKVVVVVVVSSSSSSDDDDDDDDTTTTTTTVVVVVVVVVVVVVVEEEEEEEEEPPPPPPPYYYYYYYYYYYYNNNNNNNNAAAAATTTTTTTLLLLLLLLSSSSSSVVVVVVVHHHHHHHHHHQQQQQQQQQLLLLLLLLVVVVVVVEEEEEEEEENNNNNNNNAAAAADDDDDDDDEEEEEEEEECCCCCCMMMMMMMMVVVVVVVLLLLLLLLDDDDDDDDNNNNNNNNEEEEEEEEEAAAAALLLLLLLLYYYYYYYYYYYYDDDDDDDDIIIIIIIICCCCCCFFFFFFFFFFFRRRRRRRRRRRTTTTTTTLLLLLLLLKKKKKKKKKLLLLLLLLTTTTTTTTTTTTTTPPPPPPPSSSSSSFFFFFFFFFFFGGGGDDDDDDDDLLLLLLLLNNNNNNNNHHHHHHHHHHLLLLLLLLIIIIIIIISSSSSSAAAAATTTTTTTMMMMMMMMSSSSSSGGGGVVVVVVVTTTTTTTCCCCCCCCCCCCLLLLLLLLRRRRRRRRRRRFFFFFFFFFFFPPPPPPPGGGGQQQQQQQQQLLLLLLLLNNNNNNNNSSSSSSDDDDDDDDLLLLLLLLRRRRRRRRRRRKKKKKKKKKLLLLLLLLAAAAAVVVVVVVNNNNNNNNLLLLLLLLIIIIIIIIPPPPPPPFFFFFFFFFFFPPPPPPPRRRRRRRRRRRLLLLLLLLHHHHHHHHHHFFFFFFFFFFFFFFFFFFFFFFMMMMMMMMVVVVVVVGGGGFFFFFFFFFFFAAAAAPPPPPPPLLLLLLLLTTTTTTTSSSSSSRRRRRRRRRRRGGGGSSSSSSQQQQQQQQQQQQQQQQQQYYYYYYYYYYYYRRRRRRRRRRRAAAAALLLLLLLLTTTTTTTVVVVVVVPPPPPPPEEEEEEEEELLLLLLLLTTTTTTTQQQQQQQQQQQQQQQQQQMMMMMMMMWWWWWWWWWWWWWWDDDDDDDDAAAAAKKKKKKKKKNNNNNNNNMMMMMMMMMMMMMMMMCCCCCCAAAAAAAAAADDDDDDDDPPPPPPPRRRRRRRRRRRHHHHHHHHHHGGGGRRRRRRRRRRRYYYYYYYYYYYYLLLLLLLLTTTTTTTAAAAASSSSSSAAAAAMMMMMMMMFFFFFFFFFFFRRRRRRRRRRRGGGGKKKKKKKKKMMMMMMMMSSSSSSTTTTTTTKKKKKKKKKEEEEEEEEEVVVVVVVDDDDDDDDEEEEEEEEEQQQQQQQQQMMMMMMMMIIIIIIIINNNNNNNNVVVVVVVQQQQQQQQQNNNNNNNNKKKKKKKKKNNNNNNNNSSSSSSSSSSSSYYYYYYYYYYYYFFFFFFFFFFFVVVVVVVEEEEEEEEEWWWWWWWWWWWWWWIIIIIIIIPPPPPPPNNNNNNNNNNNNNNNNVVVVVVVKKKKKKKKKSSSSSSTTTTTTTVVVVVVVCCCCCCDDDDDDDDIIIIIIIIPPPPPPPPPPPPPPTTTTTTTGGGGLLLLLLLLKKKKKKKKKMMMMMMMMAAAAASSSSSSTTTTTTTFFFFFFFFFFFIIIIIIIIGGGGNNNNNNNNSSSSSSTTTTTTTSSSSSSIIIIIIIIQQQQQQQQQEEEEEEEEEMMMMMMMMFFFFFFFFFFFRRRRRRRRRRRRRRRRRRRRRRVVVVVVVSSSSSSEEEEEEEEEQQQQQQQQQFFFFFFFFFFFTTTTTTTAAAAAMMMMMMMMFFFFFFFFFFFRRRRRRRRRRRRRRRRRRRRRRKKKKKKKKKAAAAAFFFFFFFFFFFLLLLLLLLHHHHHHHHHHWWWWWWWWWWWWWWYYYYYYYYYYYYTTTTTTTGGGGEEEEEEEEEGGGGMMMMMMMMDDDDDDDDEEEEEEEEEMMMMMMMMEEEEEEEEEFFFFFFFFFFFTTTTTTTEEEEEEEEEAAAAAEEEEEEEEESSSSSSNNNNNNNNMMMMMMMMNNNNNNNNDDDDDDDDLLLLLLLLVVVVVVVSSSSSSEEEEEEEEEYYYYYYYYYYYYQQQQQQQQQQQQQQQQQQYYYYYYYYYYYYQQQQQQQQQDDDDDDDDAAAAATTTTTTTAAAAADDDDDDDDEEEEEEEEEDDDDDDDDGGGGYYYYYYYYYYYYEEEEEEEEEYYYYYYYYYYYYEEEEEEEEEDDDDDDDDEEEEEEEEEEEEEEEEEEEEEEEEEEEVVVVVVVGGGGEEEEEEEEEEEEEEEEEEDDDDDDDDAAAAAA

SEQ ID NO: 153 - protein, 3488 aa, Zea mays
MMMMMMMMRRRRRRRRRRREEEEEEEEEIIIIIIIILLLLLLLLHHHHHHHHHHIIIIIIIIQQQQQQQQQGGGGGGGGQQQQQQQQQCCCCCCGGGGNNNNNNNNQQQQQQQQQIIIIIIIIGGGGSSSSSSKKKKKKKKKFFFFFFFFFFFWWWWWWWWWWWWWWEEEEEEEEEVVVVVVVVVVVVVVCCCCCCDDDDDDDDEEEEEEEEEHHHHHHHHHHGGGGIIIIIIIIDDDDDDDDPPPPPPPTTTTTTTGGGGRRRRRRRRRRRYYYYYYYYYYYYMMMMMMMMGGGGTTTTTTTSSSSSSDDDDDDDDVVVVVVVQQQQQQQQQLLLLLLLLEEEEEEEEERRRRRRRRRRRVVVVVVVNNNNNNNNVVVVVVVYYYYYYYYYYYYYYYYYYYYYYYYNNNNNNNNEEEEEEEEEAAAAASSSSSSCCCCCCGGGGRRRRRRRRRRRFFFFFFFFFFFVVVVVVVPPPPPPPRRRRRRRRRRRAAAAAVVVVVVVLLLLLLLLMMMMMMMMDDDDDDDDLLLLLLLLEEEEEEEEEPPPPPPPGGGGTTTTTTTMMMMMMMMDDDDDDDDAAAAAVVVVVVVRRRRRRRRRRRTTTTTTTGGGGPPPPPPPYYYYYYYYYYYYGGGGQQQQQQQQQIIIIIIIIFFFFFFFFFFFRRRRRRRRRRRPPPPPPPDDDDDDDDNNNNNNNNFFFFFFFFFFFVVVVVVVFFFFFFFFFFFGGGGQQQQQQQQQSSSSSSGGGGAAAAAGGGGNNNNNNNNNNNNNNNNWWWWWWWWWWWWWWAAAAAKKKKKKKKKGGGGHHHHHHHHHHYYYYYYYYYYYYTTTTTTTEEEEEEEEEGGGGAAAAAEEEEEEEEELLLLLLLLIIIIIIIIDDDDDDDDSSSSSSVVVVVVVLLLLLLLLDDDDDDDDVVVVVVVVVVVVVVRRRRRRRRRRRKKKKKKKKKEEEEEEEEEAAAAAEEEEEEEEENNNNNNNNCCCCCCDDDDDDDDCCCCCCLLLLLLLLQQQQQQQQQGGGGFFFFFFFFFFFQQQQQQQQQVVVVVVVCCCCCCHHHHHHHHHHSSSSSSLLLLLLLLGGGGGGGGGGGGTTTTTTTGGGGSSSSSSGGGGMMMMMMMMGGGGTTTTTTTLLLLLLLLLLLLLLLLIIIIIIIISSSSSSKKKKKKKKKIIIIIIIIRRRRRRRRRRREEEEEEEEEEEEEEEEEEYYYYYYYYYYYYPPPPPPPDDDDDDDDRRRRRRRRRRRMMMMMMMMMMMMMMMMMMMMMMMMTTTTTTTFFFFFFFFFFFSSSSSSVVVVVVVFFFFFFFFFFFPPPPPPPSSSSSSPPPPPPPKKKKKKKKKVVVVVVVSSSSSSDDDDDDDDTTTTTTTVVVVVVVVVVVVVVEEEEEEEEEPPPPPPPYYYYYYYYYYYYNNNNNNNNAAAAATTTTTTTLLLLLLLLSSSSSSVVVVVVVHHHHHHHHHHQQQQQQQQQLLLLLLLLVVVVVVVEEEEEEEEENNNNNNNNAAAAADDDDDDDDEEEEEEEEECCCCCCMMMMMMMMVVVVVVVLLLLLLLLDDDDDDDDNNNNNNNNEEEEEEEEEAAAAALLLLLLLLYYYYYYYYYYYYDDDDDDDDIIIIIIIICCCCCCFFFFFFFFFFFRRRRRRRRRRRTTTTTTTLLLLLLLLKKKKKKKKKLLLLLLLLTTTTTTTTTTTTTTPPPPPPPSSSSSSFFFFFFFFFFFGGGGDDDDDDDDLLLLLLLLNNNNNNNNHHHHHHHHHHLLLLLLLLIIIIIIIISSSSSSAAAAATTTTTTTMMMMMMMMSSSSSSGGGGVVVVVVVTTTTTTTCCCCCCCCCCCCLLLLLLLLRRRRRRRRRRRFFFFFFFFFFFPPPPPPPGGGGQQQQQQQQQLLLLLLLLNNNNNNNNSSSSSSDDDDDDDDLLLLLLLLRRRRRRRRRRRKKKKKKKKKLLLLLLLLAAAAAVVVVVVVNNNNNNNNLLLLLLLLIIIIIIIIPPPPPPPFFFFFFFFFFFPPPPPPPRRRRRRRRRRRLLLLLLLLHHHHHHHHHHFFFFFFFFFFFFFFFFFFFFFFMMMMMMMMVVVVVVVGGGGFFFFFFFFFFFAAAAAPPPPPPPLLLLLLLLTTTTTTTSSSSSSRRRRRRRRRRRGGGGSSSSSSQQQQQQQQQQQQQQQQQQYYYYYYYYYYYYRRRRRRRRRRRSSSSSSLLLLLLLLTTTTTTTVVVVVVVPPPPPPPEEEEEEEEELLLLLLLLTTTTTTTQQQQQQQQQQQQQQQQQQMMMMMMMMWWWWWWWWWWWWWWDDDDDDDDSSSSSSKKKKKKKKKNNNNNNNNMMMMMMMMMMMMMMMMCCCCCCAAAAAAAAAADDDDDDDDPPPPPPPRRRRRRRRRRRHHHHHHHHHHGGGGRRRRRRRRRRRYYYYYYYYYYYYLLLLLLLLTTTTTTTAAAAASSSSSSAAAAAMMMMMMMMFFFFFFFFFFFRRRRRRRRRRRGGGGKKKKKKKKKMMMMMMMMSSSSSSTTTTTTTKKKKKKKKKEEEEEEEEEVVVVVVVDDDDDDDDEEEEEEEEEQQQQQQQQQMMMMMMMMIIIIIIIINNNNNNNNVVVVVVVQQQQQQQQQNNNNNNNNKKKKKKKKKNNNNNNNNSSSSSSSSSSSSYYYYYYYYYYYYFFFFFFFFFFFVVVVVVVEEEEEEEEEWWWWWWWWWWWWWWIIIIIIIIPPPPPPPNNNNNNNNNNNNNNNNVVVVVVVKKKKKKKKKSSSSSSSSSSSSVVVVVVVCCCCCCDDDDDDDDIIIIIIIIPPPPPPPPPPPPPPRRRRRRRRRRRGGGGLLLLLLLLSSSSSSMMMMMMMMSSSSSSSSSSSSTTTTTTTFFFFFFFFFFFVVVVVVVGGGGNNNNNNNNSSSSSSTTTTTTTSSSSSSIIIIIIIIQQQQQQQQQEEEEEEEEEMMMMMMMMFFFFFFFFFFFRRRRRRRRRRRRRRRRRRRRRRVVVVVVVSSSSSSEEEEEEEEEQQQQQQQQQFFFFFFFFFFFTTTTTTTAAAAAMMMMMMMMFFFFFFFFFFFRRRRRRRRRRRRRRRRRRRRRRKKKKKKKKKAAAAAFFFFFFFFFFFLLLLLLLLHHHHHHHHHHWWWWWWWWWWWWWWYYYYYYYYYYYYTTTTTTTGGGGEEEEEEEEEGGGGMMMMMMMMDDDDDDDDEEEEEEEEEMMMMMMMMEEEEEEEEEFFFFFFFFFFFTTTTTTTEEEEEEEEEAAAAAEEEEEEEEESSSSSSNNNNNNNNMMMMMMMMNNNNNNNNDDDDDDDDLLLLLLLLVVVVVVVSSSSSSEEEEEEEEEYYYYYYYYYYYYQQQQQQQQQQQQQQQQQQYYYYYYYYYYYYQQQQQQQQQDDDDDDDDAAAAATTTTTTTAAAAADDDDDDDDEEEEEEEEEEEEEEEEEEAAAAADDDDDDDDYYYYYYYYYYYYEEEEEEEEEEEEEEEEEEEEEEEEEEEEEEEEEEEEAAAAAAAAAAAAAAAEEEEEEEEEE

SEQ ID NO: 154 - protein, 3518 aa, Oryza sativa
MMMMMMMMRRRRRRRRRRREEEEEEEEEIIIIIIIILLLLLLLLHHHHHHHHHHIIIIIIIIQQQQQQQQQGGGGGGGGQQQQQQQQQCCCCCCGGGGNNNNNNNNQQQQQQQQQIIIIIIIIGGGGAAAAAKKKKKKKKKFFFFFFFFFFFWWWWWWWWWWWWWWEEEEEEEEEVVVVVVVVVVVVVVCCCCCCDDDDDDDDEEEEEEEEEHHHHHHHHHHGGGGIIIIIIIIDDDDDDDDPPPPPPPTTTTTTTGGGGRRRRRRRRRRRYYYYYYYYYYYYTTTTTTTGGGGNNNNNNNNSSSSSSDDDDDDDDLLLLLLLLQQQQQQQQQLLLLLLLLEEEEEEEEERRRRRRRRRRRVVVVVVVNNNNNNNNVVVVVVVYYYYYYYYYYYYYYYYYYYYYYYYNNNNNNNNEEEEEEEEEAAAAASSSSSSCCCCCCGGGGRRRRRRRRRRRFFFFFFFFFFFVVVVVVVPPPPPPPRRRRRRRRRRRAAAAAVVVVVVVLLLLLLLLMMMMMMMMDDDDDDDDLLLLLLLLEEEEEEEEEPPPPPPPGGGGTTTTTTTMMMMMMMMDDDDDDDDSSSSSSVVVVVVVRRRRRRRRRRRTTTTTTTGGGGPPPPPPPYYYYYYYYYYYYGGGGQQQQQQQQQIIIIIIIIFFFFFFFFFFFRRRRRRRRRRRPPPPPPPDDDDDDDDNNNNNNNNFFFFFFFFFFFVVVVVVVFFFFFFFFFFFGGGGQQQQQQQQQSSSSSSGGGGAAAAAGGGGNNNNNNNNNNNNNNNNWWWWWWWWWWWWWWAAAAAKKKKKKKKKGGGGHHHHHHHHHHYYYYYYYYYYYYTTTTTTTEEEEEEEEEGGGGAAAAAEEEEEEEEELLLLLLLLIIIIIIIIDDDDDDDDSSSSSSVVVVVVVLLLLLLLLDDDDDDDDVVVVVVVVVVVVVVRRRRRRRRRRRKKKKKKKKKEEEEEEEEEAAAAAEEEEEEEEENNNNNNNNCCCCCCDDDDDDDDCCCCCCLLLLLLLLQQQQQQQQQGGGGFFFFFFFFFFFQQQQQQQQQVVVVVVVCCCCCCHHHHHHHHHHSSSSSSLLLLLLLLGGGGGGGGGGGGTTTTTTTGGGGSSSSSSGGGGMMMMMMMMGGGGTTTTTTTLLLLLLLLLLLLLLLLIIIIIIIISSSSSSKKKKKKKKKIIIIIIIIRRRRRRRRRRREEEEEEEEEEEEEEEEEEYYYYYYYYYYYYPPPPPPPDDDDDDDDRRRRRRRRRRRMMMMMMMMMMMMMMMMLLLLLLLLTTTTTTTFFFFFFFFFFFSSSSSSVVVVVVVFFFFFFFFFFFPPPPPPPSSSSSSPPPPPPPKKKKKKKKKVVVVVVVSSSSSSDDDDDDDDTTTTTTTVVVVVVVVVVVVVVEEEEEEEEEPPPPPPPYYYYYYYYYYYYNNNNNNNNAAAAATTTTTTTLLLLLLLLSSSSSSVVVVVVVHHHHHHHHHHQQQQQQQQQLLLLLLLLVVVVVVVEEEEEEEEENNNNNNNNAAAAADDDDDDDDEEEEEEEEECCCCCCMMMMMMMMVVVVVVVLLLLLLLLDDDDDDDDNNNNNNNNEEEEEEEEEAAAAALLLLLLLLYYYYYYYYYYYYDDDDDDDDIIIIIIIICCCCCCFFFFFFFFFFFRRRRRRRRRRRTTTTTTTLLLLLLLLKKKKKKKKKLLLLLLLLTTTTTTTTTTTTTTPPPPPPPSSSSSSFFFFFFFFFFFGGGGDDDDDDDDLLLLLLLLNNNNNNNNHHHHHHHHHHLLLLLLLLIIIIIIIISSSSSSAAAAATTTTTTTMMMMMMMMSSSSSSGGGGVVVVVVVTTTTTTTCCCCCCCCCCCCLLLLLLLLRRRRRRRRRRRFFFFFFFFFFFPPPPPPPGGGGQQQQQQQQQLLLLLLLLNNNNNNNNSSSSSSDDDDDDDDLLLLLLLLRRRRRRRRRRRKKKKKKKKKLLLLLLLLAAAAAVVVVVVVNNNNNNNNLLLLLLLLIIIIIIIIPPPPPPPFFFFFFFFFFFPPPPPPPRRRRRRRRRRRLLLLLLLLHHHHHHHHHHFFFFFFFFFFFFFFFFFFFFFFMMMMMMMMVVVVVVVGGGGFFFFFFFFFFFAAAAAPPPPPPPLLLLLLLLTTTTTTTSSSSSSRRRRRRRRRRRGGGGSSSSSSQQQQQQQQQQQQQQQQQQYYYYYYYYYYYYRRRRRRRRRRRAAAAALLLLLLLLTTTTTTTVVVVVVVPPPPPPPEEEEEEEEELLLLLLLLTTTTTTTQQQQQQQQQQQQQQQQQQMMMMMMMMWWWWWWWWWWWWWWDDDDDDDDAAAAAKKKKKKKKKNNNNNNNNMMMMMMMMMMMMMMMMCCCCCCAAAAAAAAAADDDDDDDDPPPPPPPRRRRRRRRRRRHHHHHHHHHHGGGGRRRRRRRRRRRYYYYYYYYYYYYLLLLLLLLTTTTTTTAAAAASSSSSSAAAAAMMMMMMMMFFFFFFFFFFFRRRRRRRRRRRGGGGKKKKKKKKKMMMMMMMMSSSSSSTTTTTTTKKKKKKKKKEEEEEEEEEVVVVVVVDDDDDDDDEEEEEEEEEQQQQQQQQQMMMMMMMMIIIIIIIINNNNNNNNVVVVVVVQQQQQQQQQNNNNNNNNKKKKKKKKKNNNNNNNNSSSSSSSSSSSSYYYYYYYYYYYYFFFFFFFFFFFVVVVVVVEEEEEEEEEWWWWWWWWWWWWWWIIIIIIIIPPPPPPPNNNNNNNNNNNNNNNNVVVVVVVKKKKKKKKKSSSSSSSSSSSSVVVVVVVCCCCCCDDDDDDDDIIIIIIIIPPPPPPPPPPPPPPRRRRRRRRRRRGGGGLLLLLLLLSSSSSSMMMMMMMMAAAAASSSSSSTTTTTTTFFFFFFFFFFFIIIIIIIIGGGGNNNNNNNNSSSSSSTTTTTTTSSSSSSIIIIIIIIQQQQQQQQQEEEEEEEEEMMMMMMMMFFFFFFFFFFFRRRRRRRRRRRRRRRRRRRRRRVVVVVVVSSSSSSEEEEEEEEEQQQQQQQQQFFFFFFFFFFFTTTTTTTAAAAAMMMMMMMMFFFFFFFFFFFRRRRRRRRRRRRRRRRRRRRRRKKKKKKKKKAAAAAFFFFFFFFFFFLLLLLLLLHHHHHHHHHHWWWWWWWWWWWWWWYYYYYYYYYYYYTTTTTTTGGGGEEEEEEEEEGGGGMMMMMMMMDDDDDDDDEEEEEEEEEMMMMMMMMEEEEEEEEEFFFFFFFFFFFTTTTTTTEEEEEEEEEAAAAAEEEEEEEEESSSSSSNNNNNNNNMMMMMMMMNNNNNNNNDDDDDDDDLLLLLLLLVVVVVVVSSSSSSEEEEEEEEEYYYYYYYYYYYYQQQQQQQQQQQQQQQQQQYYYYYYYYYYYYQQQQQQQQQDDDDDDDDAAAAATTTTTTTAAAAADDDDDDDDEEEEEEEEEEEEEEEEEEGGGGEEEEEEEEEYYYYYYYYYYYYEEEEEEEEEDDDDDDDDEEEEEEEEEEEEEEEEEEQQQQQQQQQQQQQQQQQQEEEEEEEEEAAAAADDDDDDDDDDDDDDDDMMMMMMMMM

SEQ ID NO: 155 - protein, 3528 aa, Pisum sativum
EEEEEEEEEIIIIIIIIVVVVVVVHHHHHHHHHHIIIIIIIIQQQQQQQQQGGGGGGGGQQQQQQQQQCCCCCCGGGGNNNNNNNNQQQQQQQQQIIIIIIIIGGGGAAAAAKKKKKKKKKFFFFFFFFFFFWWWWWWWWWWWWWWEEEEEEEEEVVVVVVVVVVVVVVCCCCCCAAAAAEEEEEEEEEHHHHHHHHHHGGGGIIIIIIIIDDDDDDDDPPPPPPPTTTTTTTGGGGRRRRRRRRRRRYYYYYYYYYYYYGGGGGGGGDDDDDDDDTTTTTTTDDDDDDDDLLLLLLLLQQQQQQQQQLLLLLLLLEEEEEEEEERRRRRRRRRRRIIIIIIIINNNNNNNNVVVVVVVYYYYYYYYYYYYYYYYYYYYYYYYNNNNNNNNEEEEEEEEEAAAAASSSSSSCCCCCCGGGGRRRRRRRRRRRYYYYYYYYYYYYVVVVVVVPPPPPPPRRRRRRRRRRRAAAAAVVVVVVVLLLLLLLLMMMMMMMMDDDDDDDDLLLLLLLLEEEEEEEEEPPPPPPPGGGGTTTTTTTMMMMMMMMDDDDDDDDSSSSSSVVVVVVVRRRRRRRRRRRSSSSSSGGGGPPPPPPPYYYYYYYYYYYYGGGGQQQQQQQQQIIIIIIIIFFFFFFFFFFFRRRRRRRRRRRPPPPPPPDDDDDDDDNNNNNNNNFFFFFFFFFFFVVVVVVVFFFFFFFFFFFGGGGQQQQQQQQQSSSSSSGGGGAAAAAGGGGNNNNNNNNNNNNNNNNWWWWWWWWWWWWWWAAAAAKKKKKKKKKGGGGHHHHHHHHHHYYYYYYYYYYYYTTTTTTTEEEEEEEEEGGGGAAAAAEEEEEEEEELLLLLLLLIIIIIIIIDDDDDDDDSSSSSSVVVVVVVLLLLLLLLDDDDDDDDVVVVVVVVVVVVVVRRRRRRRRRRRKKKKKKKKKEEEEEEEEEAAAAAEEEEEEEEENNNNNNNNCCCCCCDDDDDDDDCCCCCCLLLLLLLLQQQQQQQQQGGGGFFFFFFFFFFFQQQQQQQQQVVVVVVVCCCCCCHHHHHHHHHHSSSSSSLLLLLLLLGGGGGGGGGGGGTTTTTTTGGGGSSSSSSGGGGMMMMMMMMGGGGTTTTTTTLLLLLLLLLLLLLLLLIIIIIIIISSSSSSKKKKKKKKKIIIIIIIIRRRRRRRRRRREEEEEEEEEEEEEEEEEEYYYYYYYYYYYYPPPPPPPDDDDDDDDRRRRRRRRRRRMMMMMMMMMMMMMMMMLLLLLLLLTTTTTTTFFFFFFFFFFFSSSSSSVVVVVVVFFFFFFFFFFFPPPPPPPSSSSSSPPPPPPPKKKKKKKKKVVVVVVVSSSSSSDDDDDDDDTTTTTTTVVVVVVVVVVVVVVEEEEEEEEEPPPPPPPYYYYYYYYYYYYNNNNNNNNAAAAATTTTTTTLLLLLLLLSSSSSSVVVVVVVHHHHHHHHHHQQQQQQQQQLLLLLLLLVVVVVVVEEEEEEEEENNNNNNNNAAAAADDDDDDDDEEEEEEEEECCCCCCMMMMMMMMVVVVVVVLLLLLLLLDDDDDDDDNNNNNNNNEEEEEEEEEAAAAALLLLLLLLYYYYYYYYYYYYDDDDDDDDIIIIIIIICCCCCCFFFFFFFFFFFRRRRRRRRRRRTTTTTTTLLLLLLLLKKKKKKKKKLLLLLLLLTTTTTTTTTTTTTTPPPPPPPSSSSSSFFFFFFFFFFFGGGGDDDDDDDDLLLLLLLLNNNNNNNNHHHHHHHHHHLLLLLLLLIIIIIIIISSSSSSAAAAATTTTTTTMMMMMMMMSSSSSSGGGGVVVVVVVTTTTTTTCCCCCCCCCCCCLLLLLLLLRRRRRRRRRRRFFFFFFFFFFFPPPPPPPGGGGQQQQQQQQQLLLLLLLLNNNNNNNNSSSSSSDDDDDDDDLLLLLLLLRRRRRRRRRRRKKKKKKKKKLLLLLLLLAAAAAVVVVVVVNNNNNNNNLLLLLLLLIIIIIIIIPPPPPPPFFFFFFFFFFFPPPPPPPRRRRRRRRRRRLLLLLLLLHHHHHHHHHHFFFFFFFFFFFFFFFFFFFFFFMMMMMMMMLLLLLLLLGGGGFFFFFFFFFFFAAAAAPPPPPPPLLLLLLLLTTTTTTTSSSSSSRRRRRRRRRRRGGGGSSSSSSQQQQQQQQQQQQQQQQQQYYYYYYYYYYYYRRRRRRRRRRRAAAAALLLLLLLLSSSSSSVVVVVVVPPPPPPPEEEEEEEEEIIIIIIIITTTTTTTQQQQQQQQQQQQQQQQQQMMMMMMMMWWWWWWWWWWWWWWDDDDDDDDSSSSSSKKKKKKKKKNNNNNNNNMMMMMMMMMMMMMMMMCCCCCCAAAAAAAAAADDDDDDDDPPPPPPPRRRRRRRRRRRHHHHHHHHHHGGGGRRRRRRRRRRRYYYYYYYYYYYYLLLLLLLLTTTTTTTAAAAASSSSSSAAAAAIIIIIIIIFFFFFFFFFFFRRRRRRRRRRRGGGGKKKKKKKKKMMMMMMMMSSSSSSTTTTTTTKKKKKKKKKEEEEEEEEEVVVVVVVDDDDDDDDEEEEEEEEEQQQQQQQQQMMMMMMMMMMMMMMMMNNNNNNNNVVVVVVVQQQQQQQQQNNNNNNNNKKKKKKKKKNNNNNNNNSSSSSSSSSSSSYYYYYYYYYYYYFFFFFFFFFFFVVVVVVVEEEEEEEEEWWWWWWWWWWWWWWIIIIIIIIPPPPPPPNNNNNNNNNNNNNNNNVVVVVVVKKKKKKKKKSSSSSSTTTTTTTVVVVVVVCCCCCCDDDDDDDDIIIIIIIIPPPPPPPPPPPPPPTTTTTTTGGGGLLLLLLLLKKKKKKKKKMMMMMMMMAAAAASSSSSSTTTTTTTFFFFFFFFFFFIIIIIIIIGGGGNNNNNNNNSSSSSSTTTTTTTSSSSSSIIIIIIIIQQQQQQQQQEEEEEEEEEMMMMMMMMFFFFFFFFFFFRRRRRRRRRRRRRRRRRRRRRRVVVVVVVSSSSSSEEEEEEEEEQQQQQQQQQFFFFFFFFFFFTTTTTTTAAAAAMMMMMMMMFFFFFFFFFFFRRRRRRRRRRRRRRRRRRRRRRKKKKKKKKKAAAAAFFFFFFFFFFFLLLLLLLLHHHHHHHHHHWWWWWWWWWWWWWWYYYYYYYYYYYYTTTTTTTGGGGEEEEEEEEEGGGGMMMMMMMMDDDDDDDDEEEEEEEEEMMMMMMMMEEEEEEEEEFFFFFFFFFFFTTTTTTTEEEEEEEEEAAAAAEEEEEEEEESSSSSSNNNNNNNNMMMMMMMMNNNNNNNNDDDDDDDDLLLLLLLLVVVVVVVSSSSSSEEEEEEEEEYYYYYYYYYYYYQQQQQQQQQQQQQQQQQQYYYYYYYYYYYYQQQQQQQQQDDDDDDDDAAAAATTTTTTTAAAAAEEEEEEEEEEEEEEEEEEDDDDDDDDEEEEEEEEEYYYYYYYYYYYYEEEEEEEEEEEEEEEEEEEEEEEEEEEEEEEEEEEEEEEEEEEEEDDDDDDDDYYYYYYYYYYYYHHHHHHHHHHQQQQQQQQQEEEEEEEEEHHHHHHHHHHDDDDDDDDEEEEEEEEEMMMMMMMMM

SEQ ID NO: 156 - protein, 3528 aa, Physarum polycephalum
MMMMMMMMRRRRRRRRRRREEEEEEEEEIIIIIIIIVVVVVVVHHHHHHHHHHVVVVVVVQQQQQQQQQVVVVVVVGGGGQQQQQQQQQCCCCCCGGGGNNNNNNNNQQQQQQQQQVVVVVVVGGGGAAAAAKKKKKKKKKFFFFFFFFFFFWWWWWWWWWWWWWWEEEEEEEEEVVVVVVVVVVVVVVSSSSSSEEEEEEEEEEEEEEEEEEHHHHHHHHHHGGGGIIIIIIIIDDDDDDDDSSSSSSAAAAAGGGGTTTTTTTYYYYYYYYYYYYKKKKKKKKKGGGGDDDDDDDDTTTTTTTDDDDDDDDLLLLLLLLQQQQQQQQQLLLLLLLLEEEEEEEEERRRRRRRRRRRIIIIIIIINNNNNNNNVVVVVVVYYYYYYYYYYYYYYYYYYYYYYYYNNNNNNNNEEEEEEEEEVVVVVVVAAAAAGGGGSSSSSSKKKKKKKKKYYYYYYYYYYYYVVVVVVVPPPPPPPRRRRRRRRRRRAAAAAVVVVVVVLLLLLLLLVVVVVVVDDDDDDDDLLLLLLLLEEEEEEEEEPPPPPPPGGGGVVVVVVVLLLLLLLLDDDDDDDDSSSSSSIIIIIIIIRRRRRRRRRRRAAAAASSSSSSSSSSSSIIIIIIIIGGGGSSSSSSMMMMMMMMFFFFFFFFFFFRRRRRRRRRRRPPPPPPPDDDDDDDDNNNNNNNNFFFFFFFFFFFTTTTTTTHHHHHHHHHHAAAAAQQQQQQQQQSSSSSSGGGGAAAAAGGGGNNNNNNNNNNNNNNNNWWWWWWWWWWWWWWAAAAAKKKKKKKKKGGGGHHHHHHHHHHYYYYYYYYYYYYTTTTTTTEEEEEEEEEGGGGAAAAAEEEEEEEEELLLLLLLLVVVVVVVEEEEEEEEESSSSSSVVVVVVVVVVVVVVDDDDDDDDVVVVVVVVVVVVVVRRRRRRRRRRRKKKKKKKKKEEEEEEEEEAAAAAEEEEEEEEENNNNNNNNCCCCCCDDDDDDDDCCCCCCLLLLLLLLQQQQQQQQQGGGGFFFFFFFFFFFQQQQQQQQQIIIIIIIICCCCCCHHHHHHHHHHSSSSSSLLLLLLLLGGGGGGGGGGGGTTTTTTTGGGGSSSSSSGGGGLLLLLLLLGGGGTTTTTTTLLLLLLLLLLLLLLLLIIIIIIIISSSSSSKKKKKKKKKIIIIIIIIRRRRRRRRRRREEEEEEEEEEEEEEEEEEFFFFFFFFFFFPPPPPPPDDDDDDDDRRRRRRRRRRRMMMMMMMMMMMMMMMMCCCCCCTTTTTTTFFFFFFFFFFFSSSSSSVVVVVVVMMMMMMMMPPPPPPPSSSSSSPPPPPPPKKKKKKKKKVVVVVVVSSSSSSDDDDDDDDTTTTTTTVVVVVVVVVVVVVVEEEEEEEEEPPPPPPPYYYYYYYYYYYYNNNNNNNNAAAAATTTTTTTLLLLLLLLSSSSSSIIIIIIIIHHHHHHHHHHQQQQQQQQQLLLLLLLLVVVVVVVEEEEEEEEENNNNNNNNAAAAADDDDDDDDEEEEEEEEEVVVVVVVMMMMMMMMCCCCCCIIIIIIIIDDDDDDDDNNNNNNNNEEEEEEEEEAAAAALLLLLLLLYYYYYYYYYYYYDDDDDDDDIIIIIIIICCCCCCFFFFFFFFFFFRRRRRRRRRRRTTTTTTTLLLLLLLLKKKKKKKKKLLLLLLLLTTTTTTTTTTTTTTPPPPPPPTTTTTTTYYYYYYYYYYYYGGGGDDDDDDDDLLLLLLLLNNNNNNNNHHHHHHHHHHLLLLLLLLVVVVVVVSSSSSSGGGGVVVVVVVMMMMMMMMSSSSSSGGGGIIIIIIIITTTTTTTAAAAACCCCCCLLLLLLLLRRRRRRRRRRRFFFFFFFFFFFPPPPPPPGGGGQQQQQQQQQLLLLLLLLNNNNNNNNSSSSSSDDDDDDDDLLLLLLLLRRRRRRRRRRRKKKKKKKKKLLLLLLLLAAAAAVVVVVVVNNNNNNNNLLLLLLLLIIIIIIIIPPPPPPPFFFFFFFFFFFPPPPPPPRRRRRRRRRRRLLLLLLLLHHHHHHHHHHFFFFFFFFFFFFFFFFFFFFFFLLLLLLLLIIIIIIIIGGGGYYYYYYYYYYYYAAAAAPPPPPPPLLLLLLLLTTTTTTTAAAAARRRRRRRRRRRSSSSSSAAAAAMMMMMMMMGGGGFFFFFFFFFFFRRRRRRRRRRRAAAAALLLLLLLLTTTTTTTVVVVVVVPPPPPPPEEEEEEEEELLLLLLLLTTTTTTTQQQQQQQQQQQQQQQQQQIIIIIIIIFFFFFFFFFFFDDDDDDDDSSSSSSRRRRRRRRRRRNNNNNNNNMMMMMMMMMMMMMMMMAAAAAAAAAASSSSSSDDDDDDDDPPPPPPPRRRRRRRRRRRHHHHHHHHHHGGGGRRRRRRRRRRRYYYYYYYYYYYYLLLLLLLLTTTTTTTAAAAASSSSSSAAAAATTTTTTTFFFFFFFFFFFRRRRRRRRRRRGGGGKKKKKKKKKMMMMMMMMSSSSSSTTTTTTTKKKKKKKKKEEEEEEEEEVVVVVVVDDDDDDDDEEEEEEEEEQQQQQQQQQMMMMMMMMHHHHHHHHHHAAAAAVVVVVVVQQQQQQQQQTTTTTTTKKKKKKKKKNNNNNNNNSSSSSSSSSSSSFFFFFFFFFFFFFFFFFFFFFFVVVVVVVEEEEEEEEEWWWWWWWWWWWWWWIIIIIIIIPPPPPPPNNNNNNNNNNNNNNNNIIIIIIIIKKKKKKKKKSSSSSSSSSSSSVVVVVVVCCCCCCDDDDDDDDIIIIIIIIPPPPPPPPPPPPPPKKKKKKKKKGGGGMMMMMMMMKKKKKKKKKMMMMMMMMSSSSSSAAAAATTTTTTTFFFFFFFFFFFIIIIIIIIGGGGNNNNNNNNNNNNNNNNTTTTTTTCCCCCCIIIIIIIIQQQQQQQQQEEEEEEEEELLLLLLLLFFFFFFFFFFFKKKKKKKKKRRRRRRRRRRRIIIIIIIIGGGGLLLLLLLLQQQQQQQQQFFFFFFFFFFFSSSSSSAAAAAMMMMMMMMFFFFFFFFFFFRRRRRRRRRRRRRRRRRRRRRRKKKKKKKKKAAAAAFFFFFFFFFFFLLLLLLLLHHHHHHHHHHWWWWWWWWWWWWWWYYYYYYYYYYYYTTTTTTTGGGGEEEEEEEEEGGGGMMMMMMMMDDDDDDDDEEEEEEEEEMMMMMMMMEEEEEEEEEFFFFFFFFFFFTTTTTTTEEEEEEEEEAAAAAEEEEEEEEESSSSSSNNNNNNNNMMMMMMMMNNNNNNNNDDDDDDDDLLLLLLLLVVVVVVVSSSSSSEEEEEEEEEYYYYYYYYYYYYQQQQQQQQQQQQQQQQQQYYYYYYYYYYYYQQQQQQQQQEEEEEEEEEAAAAASSSSSSVVVVVVVDDDDDDDDDDDDDDDDEEEEEEEEEAAAAAMMMMMMMMEEEEEEEEEDDDDDDDDDDDDDDDDAAAAAEEEEEEEEEAAAAAEEEEEEEEEGGGGGGGGAAAAAGGGGQQQQQQQQQNNNNNNNNEEEEEEEEEAAAAAVVVVVVVEEEEEEEEEEEEEEEEEEFFFFFFFFFFFF

SEQ ID NO: 157 - protein, 3317 aa, Porphyra purpurea
DDDDDDDDEEEEEEEEEHHHHHHHHHHGGGGVVVVVVVDDDDDDDDPPPPPPPTTTTTTTGGGGTTTTTTTYYYYYYYYYYYYHHHHHHHHHHGGGGDDDDDDDDSSSSSSDDDDDDDDLLLLLLLLQQQQQQQQQLLLLLLLLEEEEEEEEERRRRRRRRRRRIIIIIIIINNNNNNNNVVVVVVVYYYYYYYYYYYYYYYYYYYYYYYYNNNNNNNNEEEEEEEEEAAAAATTTTTTTGGGGGGGGRRRRRRRRRRRYYYYYYYYYYYYVVVVVVVPPPPPPPRRRRRRRRRRRAAAAAIIIIIIIILLLLLLLLMMMMMMMMDDDDDDDDLLLLLLLLEEEEEEEEEPPPPPPPGGGGTTTTTTTMMMMMMMMDDDDDDDDSSSSSSVVVVVVVRRRRRRRRRRRAAAAAGGGGPPPPPPPFFFFFFFFFFFGGGGQQQQQQQQQLLLLLLLLFFFFFFFFFFFRRRRRRRRRRRPPPPPPPDDDDDDDDNNNNNNNNFFFFFFFFFFFVVVVVVVFFFFFFFFFFFGGGGQQQQQQQQQTTTTTTTGGGGAAAAAGGGGNNNNNNNNNNNNNNNNWWWWWWWWWWWWWWAAAAAKKKKKKKKKGGGGHHHHHHHHHHYYYYYYYYYYYYTTTTTTTEEEEEEEEEGGGGAAAAAEEEEEEEEELLLLLLLLIIIIIIIIDDDDDDDDSSSSSSVVVVVVVLLLLLLLLDDDDDDDDVVVVVVVVVVVVVVRRRRRRRRRRRKKKKKKKKKEEEEEEEEEAAAAAEEEEEEEEESSSSSSCCCCCCDDDDDDDDCCCCCCLLLLLLLLQQQQQQQQQGGGGFFFFFFFFFFFQQQQQQQQQIIIIIIIITTTTTTTHHHHHHHHHHSSSSSSLLLLLLLLGGGGGGGGGGGGTTTTTTTGGGGSSSSSSGGGGMMMMMMMMGGGGTTTTTTTLLLLLLLLLLLLLLLLIIIIIIIISSSSSSKKKKKKKKKIIIIIIIIRRRRRRRRRRREEEEEEEEEEEEEEEEEEYYYYYYYYYYYYPPPPPPPDDDDDDDDRRRRRRRRRRRVVVVVVVMMMMMMMMLLLLLLLLTTTTTTTFFFFFFFFFFFSSSSSSVVVVVVVCCCCCCPPPPPPPSSSSSSPPPPPPPKKKKKKKKKVVVVVVVSSSSSSDDDDDDDDTTTTTTTVVVVVVVVVVVVVVEEEEEEEEEPPPPPPPYYYYYYYYYYYYNNNNNNNNAAAAATTTTTTTLLLLLLLLSSSSSSVVVVVVVHHHHHHHHHHQQQQQQQQQLLLLLLLLVVVVVVVEEEEEEEEENNNNNNNNAAAAADDDDDDDDEEEEEEEEEVVVVVVVMMMMMMMMVVVVVVVLLLLLLLLDDDDDDDDNNNNNNNNEEEEEEEEEAAAAALLLLLLLLYYYYYYYYYYYYDDDDDDDDIIIIIIIICCCCCCFFFFFFFFFFFRRRRRRRRRRRTTTTTTTLLLLLLLLKKKKKKKKKLLLLLLLLTTTTTTTTTTTTTTPPPPPPPTTTTTTTYYYYYYYYYYYYGGGGDDDDDDDDLLLLLLLLNNNNNNNNHHHHHHHHHHLLLLLLLLVVVVVVVCCCCCCAAAAACCCCCCMMMMMMMMSSSSSSGGGGVVVVVVVTTTTTTTSSSSSSCCCCCCLLLLLLLLRRRRRRRRRRRFFFFFFFFFFFPPPPPPPGGGGQQQQQQQQQLLLLLLLLNNNNNNNNSSSSSSDDDDDDDDLLLLLLLLRRRRRRRRRRRKKKKKKKKKLLLLLLLLAAAAAVVVVVVVNNNNNNNNLLLLLLLLIIIIIIIIPPPPPPPFFFFFFFFFFFPPPPPPPRRRRRRRRRRRLLLLLLLLHHHHHHHHHHFFFFFFFFFFFFFFFFFFFFFFMMMMMMMMIIIIIIIIGGGGFFFFFFFFFFFAAAAAPPPPPPPLLLLLLLLTTTTTTTSSSSSSRRRRRRRRRRRGGGGSSSSSSQQQQQQQQQQQQQQQQQQYYYYYYYYYYYYRRRRRRRRRRRAAAAALLLLLLLLTTTTTTTVVVVVVVPPPPPPPEEEEEEEEELLLLLLLLTTTTTTTQQQQQQQQQQQQQQQQQQQQQQQQQQQFFFFFFFFFFFDDDDDDDDAAAAAKKKKKKKKKNNNNNNNNMMMMMMMMMMMMMMMMCCCCCCAAAAAAAAAADDDDDDDDPPPPPPPRRRRRRRRRRRHHHHHHHHHHGGGGRRRRRRRRRRRYYYYYYYYYYYYLLLLLLLLTTTTTTTAAAAASSSSSSCCCCCCMMMMMMMMFFFFFFFFFFFRRRRRRRRRRRGGGGRRRRRRRRRRRMMMMMMMMSSSSSSTTTTTTTKKKKKKKKKEEEEEEEEEVVVVVVVDDDDDDDDEEEEEEEEEQQQQQQQQQMMMMMMMMLLLLLLLLNNNNNNNNVVVVVVVQQQQQQQQQNNNNNNNNKKKKKKKKKNNNNNNNNSSSSSSSSSSSSYYYYYYYYYYYYFFFFFFFFFFFVVVVVVVEEEEEEEEEWWWWWWWWWWWWWWIIIIIIIIPPPPPPPNNNNNNNNNNNNNNNNIIIIIIIIKKKKKKKKKSSSSSSSSSSSSVVVVVVVCCCCCCDDDDDDDDIIIIIIIIPPPPPPPPPPPPPPKKKKKKKKKGGGGLLLLLLLLKKKKKKKKKMMMMMMMMSSSSSSAAAAACCCCCCFFFFFFFFFFFIIIIIIIIGGGGNNNNNNNNSSSSSSTTTTTTTAAAAAIIIIIIIIQQQQQQQQQEEEEEEEEEMMMMMMMMFFFFFFFFFFFKKKKKKKKKRRRRRRRRRRRIIIIIIIIGGGGEEEEEEEEEQQQQQQQQQFFFFFFFFFFFTTTTTTTAAAAAMMMMMMMMFFFFFFFFFFFRRRRRRRRRRRRRRRRRRRRRRKKKKKKKKKAAAAAFFFFFFFFFFFLLLLLLLLHHHHHHHHHHWWWWWWWWWWWWWWYYYYYYYYYYYYTTTTTTTGGGGEEEEEEEEEGGGGMMMMMMMMDDDDDDDDEEEEEEEEEMMMMMMMMEEEEEEEEEFFFFFFFFFFFTTTTTTTEEEEEEEEEAAAAAEEEEEEEEESSSSSSNNNNNNNNMMMMMMMMNNNNNNNNDDDDDDDDLLLLLLLLVVVVVVVSSSSSSEEEEEEEEEYYYYYYYYYYYYQQQQQQQQQQQQQQQQQQYYYYYYYYYYYYQQQQQQQQQDDDDDDDDAAAAATTTTTTTAAAAAEEEEEEEEEEEEEEEEEEEEEEEEEEEGGGGEEEEEEEEEYYYYYYYYYYYYDDDDDDDDEEEEEEEEEDDDDDDDDEEEEEEEEEDDDDDDDDDDDDDDDDEEEEEEEEEGGGGGGGGDDDDDDDDYYYYYYYYYYYYAAAAAA

SEQ ID NO: 158 - protein, 3544 aa, Solanum tuberosum
MMMMMMMMRRRRRRRRRRREEEEEEEEEIIIIIIIILLLLLLLLHHHHHHHHHHIIIIIIIIQQQQQQQQQGGGGGGGGQQQQQQQQQCCCCCCGGGGNNNNNNNNQQQQQQQQQIIIIIIIIGGGGSSSSSSKKKKKKKKKFFFFFFFFFFFWWWWWWWWWWWWWWEEEEEEEEEVVVVVVVIIIIIIIICCCCCCDDDDDDDDEEEEEEEEEHHHHHHHHHHGGGGVVVVVVVDDDDDDDDPPPPPPPTTTTTTTGGGGRRRRRRRRRRRYYYYYYYYYYYYKKKKKKKKKGGGGTTTTTTTAAAAAAAAAAEEEEEEEEESSSSSSDDDDDDDDLLLLLLLLQQQQQQQQQLLLLLLLLEEEEEEEEERRRRRRRRRRRIIIIIIIINNNNNNNNVVVVVVVYYYYYYYYYYYYFFFFFFFFFFFNNNNNNNNEEEEEEEEEAAAAASSSSSSGGGGGGGGRRRRRRRRRRRYYYYYYYYYYYYVVVVVVVPPPPPPPRRRRRRRRRRRAAAAAVVVVVVVLLLLLLLLMMMMMMMMDDDDDDDDLLLLLLLLEEEEEEEEEPPPPPPPGGGGTTTTTTTMMMMMMMMDDDDDDDDSSSSSSIIIIIIIIRRRRRRRRRRRSSSSSSGGGGPPPPPPPYYYYYYYYYYYYGGGGQQQQQQQQQIIIIIIIIFFFFFFFFFFFRRRRRRRRRRRPPPPPPPDDDDDDDDNNNNNNNNLLLLLLLLVVVVVVVFFFFFFFFFFFGGGGQQQQQQQQQSSSSSSGGGGAAAAAGGGGNNNNNNNNNNNNNNNNWWWWWWWWWWWWWWAAAAAKKKKKKKKKGGGGHHHHHHHHHHYYYYYYYYYYYYTTTTTTTEEEEEEEEEGGGGAAAAAEEEEEEEEELLLLLLLLIIIIIIIIDDDDDDDDAAAAAVVVVVVVLLLLLLLLDDDDDDDDVVVVVVVVVVVVVVRRRRRRRRRRRKKKKKKKKKEEEEEEEEEAAAAAEEEEEEEEENNNNNNNNCCCCCCDDDDDDDDCCCCCCLLLLLLLLQQQQQQQQQGGGGFFFFFFFFFFFQQQQQQQQQVVVVVVVCCCCCCHHHHHHHHHHSSSSSSLLLLLLLLGGGGGGGGGGGGTTTTTTTGGGGSSSSSSGGGGMMMMMMMMGGGGTTTTTTTLLLLLLLLLLLLLLLLIIIIIIIISSSSSSKKKKKKKKKVVVVVVVRRRRRRRRRRREEEEEEEEEEEEEEEEEEYYYYYYYYYYYYPPPPPPPDDDDDDDDRRRRRRRRRRRMMMMMMMMMMMMMMMMLLLLLLLLTTTTTTTFFFFFFFFFFFSSSSSSVVVVVVVFFFFFFFFFFFPPPPPPPSSSSSSPPPPPPPKKKKKKKKKVVVVVVVSSSSSSDDDDDDDDTTTTTTTVVVVVVVVVVVVVVEEEEEEEEEPPPPPPPYYYYYYYYYYYYNNNNNNNNAAAAATTTTTTTLLLLLLLLSSSSSSVVVVVVVHHHHHHHHHHQQQQQQQQQLLLLLLLLVVVVVVVEEEEEEEEENNNNNNNNAAAAADDDDDDDDEEEEEEEEECCCCCCMMMMMMMMVVVVVVVLLLLLLLLDDDDDDDDNNNNNNNNEEEEEEEEEAAAAALLLLLLLLYYYYYYYYYYYYDDDDDDDDIIIIIIIICCCCCCFFFFFFFFFFFRRRRRRRRRRRTTTTTTTLLLLLLLLKKKKKKKKKLLLLLLLLTTTTTTTTTTTTTTPPPPPPPSSSSSSFFFFFFFFFFFGGGGDDDDDDDDLLLLLLLLNNNNNNNNHHHHHHHHHHLLLLLLLLIIIIIIIISSSSSSAAAAATTTTTTTMMMMMMMMSSSSSSGGGGVVVVVVVTTTTTTTCCCCCCCCCCCCLLLLLLLLRRRRRRRRRRRFFFFFFFFFFFPPPPPPPGGGGQQQQQQQQQLLLLLLLLNNNNNNNNSSSSSSDDDDDDDDLLLLLLLLRRRRRRRRRRRKKKKKKKKKLLLLLLLLAAAAAVVVVVVVNNNNNNNNLLLLLLLLIIIIIIIIPPPPPPPLLLLLLLLPPPPPPPRRRRRRRRRRRLLLLLLLLHHHHHHHHHHFFFFFFFFFFFFFFFFFFFFFFMMMMMMMMVVVVVVVGGGGFFFFFFFFFFFAAAAAPPPPPPPLLLLLLLLTTTTTTTSSSSSSRRRRRRRRRRRGGGGSSSSSSQQQQQQQQQQQQQQQQQQYYYYYYYYYYYYIIIIIIIISSSSSSLLLLLLLLTTTTTTTVVVVVVVPPPPPPPEEEEEEEEELLLLLLLLTTTTTTTQQQQQQQQQQQQQQQQQQMMMMMMMMWWWWWWWWWWWWWWDDDDDDDDAAAAAKKKKKKKKKNNNNNNNNMMMMMMMMMMMMMMMMCCCCCCAAAAAAAAAADDDDDDDDPPPPPPPRRRRRRRRRRRHHHHHHHHHHGGGGRRRRRRRRRRRYYYYYYYYYYYYLLLLLLLLTTTTTTTAAAAASSSSSSAAAAAMMMMMMMMFFFFFFFFFFFRRRRRRRRRRRGGGGKKKKKKKKKMMMMMMMMSSSSSSTTTTTTTKKKKKKKKKEEEEEEEEEVVVVVVVDDDDDDDDEEEEEEEEEQQQQQQQQQMMMMMMMMIIIIIIIINNNNNNNNVVVVVVVQQQQQQQQQNNNNNNNNKKKKKKKKKNNNNNNNNSSSSSSSSSSSSYYYYYYYYYYYYFFFFFFFFFFFVVVVVVVEEEEEEEEEWWWWWWWWWWWWWWIIIIIIIIPPPPPPPNNNNNNNNNNNNNNNNVVVVVVVKKKKKKKKKSSSSSSSSSSSSVVVVVVVCCCCCCDDDDDDDDIIIIIIIIPPPPPPPPPPPPPPTTTTTTTGGGGLLLLLLLLKKKKKKKKKMMMMMMMMAAAAASSSSSSTTTTTTTFFFFFFFFFFFVVVVVVVGGGGNNNNNNNNSSSSSSTTTTTTTSSSSSSIIIIIIIIQQQQQQQQQEEEEEEEEEMMMMMMMMFFFFFFFFFFFRRRRRRRRRRRRRRRRRRRRRRVVVVVVVSSSSSSEEEEEEEEEQQQQQQQQQFFFFFFFFFFFTTTTTTTAAAAAMMMMMMMMFFFFFFFFFFFRRRRRRRRRRRRRRRRRRRRRRKKKKKKKKKAAAAAFFFFFFFFFFFLLLLLLLLHHHHHHHHHHWWWWWWWWWWWWWWYYYYYYYYYYYYTTTTTTTGGGGEEEEEEEEEGGGGMMMMMMMMDDDDDDDDEEEEEEEEEMMMMMMMMEEEEEEEEEFFFFFFFFFFFTTTTTTTEEEEEEEEEAAAAAEEEEEEEEESSSSSSNNNNNNNNMMMMMMMMNNNNNNNNDDDDDDDDPPPPPPPVVVVVVVAAAAAEEEEEEEEEYYYYYYYYYYYYQQQQQQQQQQQQQQQQQQYYYYYYYYYYYYQQQQQQQQQDDDDDDDDAAAAATTTTTTTAAAAADDDDDDDDDDDDDDDDEEEEEEEEEEEEEEEEEEEEEEEEEEEYYYYYYYYYYYYDDDDDDDDDDDDDDDDEEEEEEEEEAAAAAAAAAADDDDDDDDDDDDDDDDHHHHHHHHHHHHHHHHHHHHQQQQQQQQQYYYYYYYYYYYYEEEEEEEEESSSSSSS

SEQ ID NO: 159 - protein, 3544 aa, Glycine max
MMMMMMMMRRRRRRRRRRREEEEEEEEESSSSSSLLLLLLLLHHHHHHHHHHIIIIIIIIQQQQQQQQQGGGGGGGGQQQQQQQQQCCCCCCGGGGNNNNNNNNQQQQQQQQQIIIIIIIIGGGGAAAAAKKKKKKKKKFFFFFFFFFFFWWWWWWWWWWWWWWEEEEEEEEEVVVVVVVVVVVVVVCCCCCCAAAAAEEEEEEEEEHHHHHHHHHHGGGGIIIIIIIIDDDDDDDDPPPPPPPTTTTTTTGGGGRRRRRRRRRRRYYYYYYYYYYYYGGGGGGGGDDDDDDDDSSSSSSEEEEEEEEELLLLLLLLQQQQQQQQQLLLLLLLLEEEEEEEEERRRRRRRRRRRIIIIIIIINNNNNNNNVVVVVVVYYYYYYYYYYYYYYYYYYYYYYYYNNNNNNNNEEEEEEEEEAAAAASSSSSSCCCCCCGGGGRRRRRRRRRRRFFFFFFFFFFFVVVVVVVRRRRRRRRRRRRRRRRRRRRRRAAAAAVVVVVVVLLLLLLLLMMMMMMMMDDDDDDDDLLLLLLLLEEEEEEEEEPPPPPPPGGGGTTTTTTTMMMMMMMMDDDDDDDDSSSSSSVVVVVVVRRRRRRRRRRRSSSSSSGGGGPPPPPPPYYYYYYYYYYYYGGGGQQQQQQQQQIIIIIIIIFFFFFFFFFFFRRRRRRRRRRRPPPPPPPDDDDDDDDNNNNNNNNFFFFFFFFFFFVVVVVVVFFFFFFFFFFFGGGGQQQQQQQQQSSSSSSGGGGAAAAAGGGGNNNNNNNNNNNNNNNNWWWWWWWWWWWWWWAAAAAKKKKKKKKKGGGGHHHHHHHHHHYYYYYYYYYYYYTTTTTTTEEEEEEEEEGGGGAAAAAEEEEEEEEELLLLLLLLIIIIIIIIDDDDDDDDSSSSSSVVVVVVVLLLLLLLLDDDDDDDDVVVVVVVVVVVVVVRRRRRRRRRRRKKKKKKKKKEEEEEEEEEAAAAAEEEEEEEEENNNNNNNNCCCCCCDDDDDDDDCCCCCCLLLLLLLLQQQQQQQQQGGGGFFFFFFFFFFFQQQQQQQQQVVVVVVVCCCCCCHHHHHHHHHHSSSSSSLLLLLLLLGGGGGGGGGGGGTTTTTTTGGGGSSSSSSGGGGMMMMMMMMGGGGTTTTTTTLLLLLLLLLLLLLLLLIIIIIIIISSSSSSKKKKKKKKKIIIIIIIIRRRRRRRRRRREEEEEEEEEEEEEEEEEEYYYYYYYYYYYYPPPPPPPDDDDDDDDRRRRRRRRRRRMMMMMMMMMMMMMMMMLLLLLLLLTTTTTTTFFFFFFFFFFFSSSSSSVVVVVVVFFFFFFFFFFFPPPPPPPSSSSSSPPPPPPPKKKKKKKKKVVVVVVVSSSSSSDDDDDDDDTTTTTTTVVVVVVVVVVVVVVEEEEEEEEEPPPPPPPYYYYYYYYYYYYNNNNNNNNAAAAATTTTTTTLLLLLLLLSSSSSSVVVVVVVHHHHHHHHHHQQQQQQQQQLLLLLLLLVVVVVVVEEEEEEEEENNNNNNNNAAAAADDDDDDDDEEEEEEEEESSSSSSMMMMMMMMVVVVVVVLLLLLLLLDDDDDDDDNNNNNNNNEEEEEEEEEAAAAALLLLLLLLYYYYYYYYYYYYDDDDDDDDIIIIIIIICCCCCCFFFFFFFFFFFRRRRRRRRRRRTTTTTTTLLLLLLLLKKKKKKKKKLLLLLLLLTTTTTTTTTTTTTTPPPPPPPSSSSSSFFFFFFFFFFFGGGGDDDDDDDDLLLLLLLLNNNNNNNNHHHHHHHHHHLLLLLLLLIIIIIIIISSSSSSAAAAATTTTTTTMMMMMMMMSSSSSSGGGGVVVVVVVTTTTTTTCCCCCCCCCCCCLLLLLLLLRRRRRRRRRRRFFFFFFFFFFFPPPPPPPGGGGQQQQQQQQQLLLLLLLLNNNNNNNNSSSSSSDDDDDDDDLLLLLLLLRRRRRRRRRRRKKKKKKKKKLLLLLLLLAAAAAVVVVVVVNNNNNNNNLLLLLLLLIIIIIIIIPPPPPPPFFFFFFFFFFFPPPPPPPRRRRRRRRRRRLLLLLLLLHHHHHHHHHHFFFFFFFFFFFFFFFFFFFFFFMMMMMMMMVVVVVVVGGGGFFFFFFFFFFFAAAAAPPPPPPPLLLLLLLLAAAAASSSSSSRRRRRRRRRRRGGGGSSSSSSQQQQQQQQQQQQQQQQQQYYYYYYYYYYYYRRRRRRRRRRRAAAAALLLLLLLLSSSSSSVVVVVVVPPPPPPPEEEEEEEEELLLLLLLLTTTTTTTQQQQQQQQQQQQQQQQQQMMMMMMMMWWWWWWWWWWWWWWDDDDDDDDSSSSSSKKKKKKKKKNNNNNNNNMMMMMMMMMMMMMMMMCCCCCCAAAAAAAAAADDDDDDDDPPPPPPPRRRRRRRRRRRHHHHHHHHHHGGGGRRRRRRRRRRRYYYYYYYYYYYYLLLLLLLLTTTTTTTAAAAASSSSSSAAAAAMMMMMMMMFFFFFFFFFFFRRRRRRRRRRRGGGGKKKKKKKKKMMMMMMMMSSSSSSTTTTTTTKKKKKKKKKEEEEEEEEEVVVVVVVDDDDDDDDEEEEEEEEEQQQQQQQQQMMMMMMMMIIIIIIIINNNNNNNNVVVVVVVQQQQQQQQQNNNNNNNNKKKKKKKKKNNNNNNNNSSSSSSSSSSSSYYYYYYYYYYYYFFFFFFFFFFFVVVVVVVEEEEEEEEEWWWWWWWWWWWWWWIIIIIIIIPPPPPPPHHHHHHHHHHNNNNNNNNVVVVVVVKKKKKKKKKSSSSSSTTTTTTTVVVVVVVCCCCCCDDDDDDDDIIIIIIIIPPPPPPPPPPPPPPTTTTTTTGGGGLLLLLLLLRRRRRRRRRRRMMMMMMMMAAAAASSSSSSTTTTTTTFFFFFFFFFFFIIIIIIIIGGGGNNNNNNNNSSSSSSTTTTTTTSSSSSSIIIIIIIIQQQQQQQQQEEEEEEEEEMMMMMMMMFFFFFFFFFFFRRRRRRRRRRRRRRRRRRRRRRVVVVVVVSSSSSSEEEEEEEEEQQQQQQQQQFFFFFFFFFFFTTTTTTTAAAAAMMMMMMMMFFFFFFFFFFFRRRRRRRRRRRRRRRRRRRRRRKKKKKKKKKAAAAAFFFFFFFFFFFLLLLLLLLHHHHHHHHHHWWWWWWWWWWWWWWYYYYYYYYYYYYTTTTTTTGGGGEEEEEEEEEGGGGMMMMMMMMDDDDDDDDEEEEEEEEEMMMMMMMMEEEEEEEEEFFFFFFFFFFFTTTTTTTEEEEEEEEEAAAAAEEEEEEEEESSSSSSNNNNNNNNMMMMMMMMNNNNNNNNDDDDDDDDLLLLLLLLVVVVVVVSSSSSSEEEEEEEEEYYYYYYYYYYYYQQQQQQQQQQQQQQQQQQYYYYYYYYYYYYQQQQQQQQQDDDDDDDDAAAAATTTTTTTAAAAADDDDDDDDEEEEEEEEEDDDDDDDDEEEEEEEEEYYYYYYYYYYYYEEEEEEEEEEEEEEEEEEEEEEEEEEEEEEEEEEEEEEEEEEEEEEEEEEEEEEEEEEEEEEEEEEEEEEEEFFFFFFFFFFFAAAAAQQQQQQQQQHHHHHHHHHHDDDDDDDDMMMMMMMMM

SEQ ID NO: 160 - protein, 3502 aa, Trichoderma viride
MMMMMMMMRRRRRRRRRRREEEEEEEEEIIIIIIIIVVVVVVVYYYYYYYYYYYYIIIIIIIIQQQQQQQQQTTTTTTTGGGGQQQQQQQQQCCCCCCGGGGNNNNNNNNQQQQQQQQQIIIIIIIIGGGGAAAAAAAAAAFFFFFFFFFFFWWWWWWWWWWWWWWQQQQQQQQQTTTTTTTIIIIIIIISSSSSSGGGGEEEEEEEEEHHHHHHHHHHGGGGLLLLLLLLDDDDDDDDSSSSSSNNNNNNNNGGGGIIIIIIIIYYYYYYYYYYYYNNNNNNNNGGGGSSSSSSSSSSSSEEEEEEEEELLLLLLLLQQQQQQQQQLLLLLLLLEEEEEEEEERRRRRRRRRRRMMMMMMMMNNNNNNNNVVVVVVVYYYYYYYYYYYYFFFFFFFFFFFNNNNNNNNEEEEEEEEEAAAAASSSSSSNNNNNNNNNNNNNNNNKKKKKKKKKYYYYYYYYYYYYVVVVVVVPPPPPPPRRRRRRRRRRRAAAAAVVVVVVVLLLLLLLLVVVVVVVDDDDDDDDLLLLLLLLEEEEEEEEEPPPPPPPGGGGTTTTTTTMMMMMMMMDDDDDDDDAAAAAVVVVVVVRRRRRRRRRRRAAAAAGGGGPPPPPPPFFFFFFFFFFFGGGGQQQQQQQQQLLLLLLLLFFFFFFFFFFFRRRRRRRRRRRPPPPPPPDDDDDDDDNNNNNNNNFFFFFFFFFFFIIIIIIIIFFFFFFFFFFFGGGGQQQQQQQQQSSSSSSSSSSSSAAAAAGGGGNNNNNNNNNNNNNNNNWWWWWWWWWWWWWWAAAAAKKKKKKKKKGGGGHHHHHHHHHHYYYYYYYYYYYYTTTTTTTEEEEEEEEEGGGGAAAAAEEEEEEEEELLLLLLLLVVVVVVVDDDDDDDDQQQQQQQQQVVVVVVVLLLLLLLLDDDDDDDDVVVVVVVVVVVVVVRRRRRRRRRRRRRRRRRRRRRREEEEEEEEEAAAAAEEEEEEEEEGGGGCCCCCCDDDDDDDDCCCCCCLLLLLLLLQQQQQQQQQGGGGFFFFFFFFFFFQQQQQQQQQIIIIIIIITTTTTTTHHHHHHHHHHSSSSSSLLLLLLLLGGGGGGGGGGGGTTTTTTTGGGGSSSSSSGGGGMMMMMMMMGGGGTTTTTTTLLLLLLLLLLLLLLLLLLLLLLLLSSSSSSKKKKKKKKKIIIIIIIIRRRRRRRRRRREEEEEEEEEEEEEEEEEEFFFFFFFFFFFPPPPPPPDDDDDDDDRRRRRRRRRRRMMMMMMMMMMMMMMMMAAAAATTTTTTTFFFFFFFFFFFSSSSSSVVVVVVVVVVVVVVPPPPPPPSSSSSSPPPPPPPKKKKKKKKKVVVVVVVSSSSSSDDDDDDDDTTTTTTTVVVVVVVVVVVVVVEEEEEEEEEPPPPPPPYYYYYYYYYYYYNNNNNNNNAAAAATTTTTTTLLLLLLLLSSSSSSVVVVVVVHHHHHHHHHHQQQQQQQQQLLLLLLLLVVVVVVVEEEEEEEEENNNNNNNNSSSSSSDDDDDDDDEEEEEEEEETTTTTTTFFFFFFFFFFFCCCCCCIIIIIIIIDDDDDDDDNNNNNNNNEEEEEEEEEAAAAALLLLLLLLYYYYYYYYYYYYDDDDDDDDIIIIIIIICCCCCCMMMMMMMMRRRRRRRRRRRTTTTTTTLLLLLLLLKKKKKKKKKLLLLLLLLNNNNNNNNNNNNNNNNPPPPPPPAAAAAYYYYYYYYYYYYGGGGDDDDDDDDLLLLLLLLNNNNNNNNYYYYYYYYYYYYLLLLLLLLVVVVVVVSSSSSSAAAAAVVVVVVVMMMMMMMMSSSSSSGGGGIIIIIIIITTTTTTTTTTTTTTCCCCCCLLLLLLLLRRRRRRRRRRRFFFFFFFFFFFPPPPPPPGGGGQQQQQQQQQLLLLLLLLNNNNNNNNSSSSSSDDDDDDDDLLLLLLLLRRRRRRRRRRRKKKKKKKKKLLLLLLLLAAAAAVVVVVVVNNNNNNNNMMMMMMMMVVVVVVVPPPPPPPFFFFFFFFFFFPPPPPPPRRRRRRRRRRRLLLLLLLLHHHHHHHHHHFFFFFFFFFFFFFFFFFFFFFFMMMMMMMMVVVVVVVGGGGFFFFFFFFFFFAAAAAPPPPPPPLLLLLLLLTTTTTTTSSSSSSPPPPPPPGGGGAAAAAHHHHHHHHHHSSSSSSFFFFFFFFFFFRRRRRRRRRRRAAAAAVVVVVVVTTTTTTTVVVVVVVPPPPPPPEEEEEEEEELLLLLLLLTTTTTTTQQQQQQQQQQQQQQQQQQMMMMMMMMFFFFFFFFFFFDDDDDDDDPPPPPPPKKKKKKKKKNNNNNNNNMMMMMMMMMMMMMMMMAAAAAAAAAASSSSSSDDDDDDDDFFFFFFFFFFFRRRRRRRRRRRNNNNNNNNGGGGRRRRRRRRRRRYYYYYYYYYYYYLLLLLLLLTTTTTTTCCCCCCCCCCCCSSSSSSIIIIIIIIFFFFFFFFFFFRRRRRRRRRRRGGGGKKKKKKKKKVVVVVVVAAAAAMMMMMMMMKKKKKKKKKEEEEEEEEEVVVVVVVEEEEEEEEEDDDDDDDDQQQQQQQQQMMMMMMMMRRRRRRRRRRRNNNNNNNNVVVVVVVQQQQQQQQQNNNNNNNNKKKKKKKKKNNNNNNNNSSSSSSTTTTTTTYYYYYYYYYYYYFFFFFFFFFFFVVVVVVVEEEEEEEEEWWWWWWWWWWWWWWIIIIIIIIPPPPPPPNNNNNNNNNNNNNNNNIIIIIIIIQQQQQQQQQTTTTTTTAAAAALLLLLLLLCCCCCCAAAAAIIIIIIIIPPPPPPPPPPPPPPRRRRRRRRRRRGGGGLLLLLLLLKKKKKKKKKMMMMMMMMSSSSSSSSSSSSTTTTTTTFFFFFFFFFFFIIIIIIIIGGGGNNNNNNNNSSSSSSTTTTTTTSSSSSSIIIIIIIIQQQQQQQQQEEEEEEEEELLLLLLLLFFFFFFFFFFFKKKKKKKKKRRRRRRRRRRRVVVVVVVGGGGEEEEEEEEEQQQQQQQQQFFFFFFFFFFFSSSSSSAAAAAMMMMMMMMFFFFFFFFFFFRRRRRRRRRRRRRRRRRRRRRRKKKKKKKKKAAAAAFFFFFFFFFFFLLLLLLLLHHHHHHHHHHWWWWWWWWWWWWWWYYYYYYYYYYYYTTTTTTTGGGGEEEEEEEEEGGGGMMMMMMMMDDDDDDDDEEEEEEEEEMMMMMMMMEEEEEEEEEFFFFFFFFFFFTTTTTTTEEEEEEEEEAAAAAEEEEEEEEESSSSSSNNNNNNNNMMMMMMMMNNNNNNNNDDDDDDDDLLLLLLLLVVVVVVVSSSSSSEEEEEEEEEYYYYYYYYYYYYQQQQQQQQQQQQQQQQQQYYYYYYYYYYYYQQQQQQQQQEEEEEEEEEAAAAAGGGGIIIIIIIIDDDDDDDDEEEEEEEEEEEEEEEEEEEEEEEEEEEEEEEEEEEEYYYYYYYYYYYYEEEEEEEEEDDDDDDDDEEEEEEEEEAAAAAPPPPPPPMMMMMMMMEEEEEEEEEAAAAAEEEEEEEEEEEEEEEEEEE

SEQ ID NO: 161 - protein, 3516 aa, Triticum aestivum
MMMMMMMMRRRRRRRRRRREEEEEEEEEIIIIIIIILLLLLLLLHHHHHHHHHHIIIIIIIIQQQQQQQQQGGGGGGGGQQQQQQQQQCCCCCCGGGGNNNNNNNNQQQQQQQQQIIIIIIIIGGGGAAAAAKKKKKKKKKFFFFFFFFFFFWWWWWWWWWWWWWWEEEEEEEEEVVVVVVVVVVVVVVCCCCCCDDDDDDDDEEEEEEEEEHHHHHHHHHHGGGGIIIIIIIIDDDDDDDDPPPPPPPTTTTTTTGGGGRRRRRRRRRRRYYYYYYYYYYYYTTTTTTTGGGGTTTTTTTSSSSSSDDDDDDDDLLLLLLLLQQQQQQQQQLLLLLLLLEEEEEEEEERRRRRRRRRRRVVVVVVVNNNNNNNNVVVVVVVYYYYYYYYYYYYYYYYYYYYYYYYNNNNNNNNEEEEEEEEEAAAAASSSSSSCCCCCCGGGGRRRRRRRRRRRFFFFFFFFFFFVVVVVVVPPPPPPPRRRRRRRRRRRAAAAAVVVVVVVLLLLLLLLMMMMMMMMDDDDDDDDLLLLLLLLEEEEEEEEEPPPPPPPGGGGTTTTTTTMMMMMMMMDDDDDDDDSSSSSSVVVVVVVRRRRRRRRRRRTTTTTTTGGGGPPPPPPPYYYYYYYYYYYYGGGGQQQQQQQQQIIIIIIIIFFFFFFFFFFFRRRRRRRRRRRPPPPPPPDDDDDDDDNNNNNNNNFFFFFFFFFFFVVVVVVVFFFFFFFFFFFGGGGQQQQQQQQQSSSSSSGGGGAAAAAGGGGNNNNNNNNNNNNNNNNWWWWWWWWWWWWWWAAAAAKKKKKKKKKGGGGHHHHHHHHHHYYYYYYYYYYYYTTTTTTTEEEEEEEEEGGGGAAAAAEEEEEEEEELLLLLLLLIIIIIIIIDDDDDDDDSSSSSSVVVVVVVLLLLLLLLDDDDDDDDVVVVVVVVVVVVVVRRRRRRRRRRRKKKKKKKKKEEEEEEEEEAAAAAEEEEEEEEENNNNNNNNCCCCCCDDDDDDDDCCCCCCLLLLLLLLQQQQQQQQQGGGGFFFFFFFFFFFQQQQQQQQQVVVVVVVCCCCCCHHHHHHHHHHSSSSSSLLLLLLLLGGGGGGGGGGGGTTTTTTTGGGGSSSSSSGGGGMMMMMMMMGGGGTTTTTTTLLLLLLLLLLLLLLLLIIIIIIIISSSSSSKKKKKKKKKIIIIIIIIRRRRRRRRRRREEEEEEEEEEEEEEEEEEYYYYYYYYYYYYPPPPPPPDDDDDDDDRRRRRRRRRRRMMMMMMMMMMMMMMMMLLLLLLLLTTTTTTTFFFFFFFFFFFSSSSSSVVVVVVVFFFFFFFFFFFPPPPPPPSSSSSSPPPPPPPKKKKKKKKKVVVVVVVSSSSSSDDDDDDDDTTTTTTTVVVVVVVVVVVVVVEEEEEEEEEPPPPPPPYYYYYYYYYYYYNNNNNNNNAAAAATTTTTTTLLLLLLLLSSSSSSVVVVVVVHHHHHHHHHHQQQQQQQQQLLLLLLLLVVVVVVVEEEEEEEEENNNNNNNNAAAAADDDDDDDDEEEEEEEEECCCCCCMMMMMMMMVVVVVVVLLLLLLLLDDDDDDDDNNNNNNNNEEEEEEEEEAAAAALLLLLLLLYYYYYYYYYYYYDDDDDDDDIIIIIIIICCCCCCFFFFFFFFFFFRRRRRRRRRRRTTTTTTTLLLLLLLLKKKKKKKKKLLLLLLLLTTTTTTTTTTTTTTPPPPPPPSSSSSSFFFFFFFFFFFGGGGDDDDDDDDLLLLLLLLNNNNNNNNHHHHHHHHHHLLLLLLLLIIIIIIIISSSSSSAAAAATTTTTTTMMMMMMMMSSSSSSGGGGVVVVVVVTTTTTTTCCCCCCCCCCCCLLLLLLLLRRRRRRRRRRRFFFFFFFFFFFPPPPPPPGGGGQQQQQQQQQLLLLLLLLNNNNNNNNSSSSSSDDDDDDDDLLLLLLLLRRRRRRRRRRRKKKKKKKKKLLLLLLLLAAAAAVVVVVVVNNNNNNNNLLLLLLLLIIIIIIIIPPPPPPPFFFFFFFFFFFPPPPPPPRRRRRRRRRRRLLLLLLLLHHHHHHHHHHFFFFFFFFFFFFFFFFFFFFFFMMMMMMMMVVVVVVVGGGGFFFFFFFFFFFAAAAAPPPPPPPLLLLLLLLTTTTTTTSSSSSSRRRRRRRRRRRGGGGSSSSSSQQQQQQQQQQQQQQQQQQYYYYYYYYYYYYRRRRRRRRRRRAAAAALLLLLLLLTTTTTTTVVVVVVVPPPPPPPEEEEEEEEELLLLLLLLTTTTTTTQQQQQQQQQQQQQQQQQQMMMMMMMMWWWWWWWWWWWWWWDDDDDDDDAAAAAKKKKKKKKKNNNNNNNNMMMMMMMMMMMMMMMMCCCCCCAAAAAAAAAADDDDDDDDPPPPPPPRRRRRRRRRRRHHHHHHHHHHGGGGRRRRRRRRRRRYYYYYYYYYYYYLLLLLLLLTTTTTTTAAAAASSSSSSAAAAAMMMMMMMMFFFFFFFFFFFRRRRRRRRRRRGGGGKKKKKKKKKMMMMMMMMSSSSSSTTTTTTTKKKKKKKKKEEEEEEEEEVVVVVVVDDDDDDDDEEEEEEEEEQQQQQQQQQMMMMMMMMIIIIIIIINNNNNNNNVVVVVVVQQQQQQQQQNNNNNNNNKKKKKKKKKNNNNNNNNSSSSSSSSSSSSYYYYYYYYYYYYFFFFFFFFFFFVVVVVVVEEEEEEEEEWWWWWWWWWWWWWWIIIIIIIIPPPPPPPNNNNNNNNNNNNNNNNVVVVVVVKKKKKKKKKSSSSSSSSSSSSVVVVVVVCCCCCCDDDDDDDDIIIIIIIIPPPPPPPPPPPPPPTTTTTTTGGGGLLLLLLLLSSSSSSMMMMMMMMAAAAASSSSSSTTTTTTTFFFFFFFFFFFVVVVVVVGGGGNNNNNNNNSSSSSSTTTTTTTSSSSSSIIIIIIIIQQQQQQQQQEEEEEEEEEMMMMMMMMFFFFFFFFFFFRRRRRRRRRRRRRRRRRRRRRRVVVVVVVSSSSSSEEEEEEEEEQQQQQQQQQFFFFFFFFFFFTTTTTTTSSSSSSMMMMMMMMFFFFFFFFFFFRRRRRRRRRRRRRRRRRRRRRRKKKKKKKKKAAAAAFFFFFFFFFFFLLLLLLLLHHHHHHHHHHWWWWWWWWWWWWWWYYYYYYYYYYYYTTTTTTTGGGGEEEEEEEEEGGGGMMMMMMMMDDDDDDDDEEEEEEEEEMMMMMMMMEEEEEEEEEFFFFFFFFFFFTTTTTTTEEEEEEEEEAAAAAEEEEEEEEESSSSSSNNNNNNNNMMMMMMMMNNNNNNNNDDDDDDDDLLLLLLLLVVVVVVVSSSSSSEEEEEEEEEYYYYYYYYYYYYQQQQQQQQQQQQQQQQQQYYYYYYYYYYYYQQQQQQQQQDDDDDDDDAAAAATTTTTTTSSSSSSDDDDDDDDEEEEEEEEEEEEEEEEEEGGGGEEEEEEEEEYYYYYYYYYYYYEEEEEEEEEDDDDDDDDEEEEEEEEEDDDDDDDDQQQQQQQQQEEEEEEEEEPPPPPPPEEEEEEEEEEEEEEEEEEDDDDDDDDMMMMMMMMM

SEQ ID NO: 162 - protein, 3487 aa, Xenopus laevis
MMMMMMMMRRRRRRRRRRREEEEEEEEEIIIIIIIIVVVVVVVHHHHHHHHHHLLLLLLLLQQQQQQQQQAAAAAGGGGQQQQQQQQQCCCCCCGGGGNNNNNNNNQQQQQQQQQIIIIIIIIGGGGAAAAAKKKKKKKKKFFFFFFFFFFFWWWWWWWWWWWWWWEEEEEEEEEVVVVVVVIIIIIIIISSSSSSDDDDDDDDEEEEEEEEEHHHHHHHHHHGGGGIIIIIIIIDDDDDDDDPPPPPPPTTTTTTTGGGGSSSSSSYYYYYYYYYYYYHHHHHHHHHHGGGGDDDDDDDDSSSSSSDDDDDDDDLLLLLLLLQQQQQQQQQLLLLLLLLEEEEEEEEERRRRRRRRRRRIIIIIIIINNNNNNNNVVVVVVVYYYYYYYYYYYYYYYYYYYYYYYYNNNNNNNNEEEEEEEEEAAAAATTTTTTTGGGGNNNNNNNNKKKKKKKKKFFFFFFFFFFFVVVVVVVPPPPPPPRRRRRRRRRRRAAAAAIIIIIIIILLLLLLLLVVVVVVVDDDDDDDDLLLLLLLLEEEEEEEEEPPPPPPPGGGGTTTTTTTMMMMMMMMDDDDDDDDSSSSSSVVVVVVVRRRRRRRRRRRSSSSSSGGGGPPPPPPPFFFFFFFFFFFGGGGQQQQQQQQQIIIIIIIIFFFFFFFFFFFRRRRRRRRRRRPPPPPPPDDDDDDDDNNNNNNNNFFFFFFFFFFFVVVVVVVFFFFFFFFFFFGGGGQQQQQQQQQSSSSSSGGGGAAAAAGGGGNNNNNNNNNNNNNNNNWWWWWWWWWWWWWWAAAAAKKKKKKKKKGGGGHHHHHHHHHHYYYYYYYYYYYYTTTTTTTEEEEEEEEEGGGGAAAAAEEEEEEEEELLLLLLLLVVVVVVVDDDDDDDDSSSSSSVVVVVVVLLLLLLLLDDDDDDDDVVVVVVVVVVVVVVRRRRRRRRRRRKKKKKKKKKEEEEEEEEESSSSSSEEEEEEEEESSSSSSCCCCCCDDDDDDDDCCCCCCLLLLLLLLQQQQQQQQQGGGGFFFFFFFFFFFQQQQQQQQQLLLLLLLLTTTTTTTHHHHHHHHHHSSSSSSLLLLLLLLGGGGGGGGGGGGTTTTTTTGGGGSSSSSSGGGGMMMMMMMMGGGGTTTTTTTLLLLLLLLLLLLLLLLIIIIIIIISSSSSSKKKKKKKKKIIIIIIIIRRRRRRRRRRREEEEEEEEEEEEEEEEEEYYYYYYYYYYYYPPPPPPPDDDDDDDDRRRRRRRRRRRIIIIIIIIMMMMMMMMNNNNNNNNTTTTTTTFFFFFFFFFFFSSSSSSVVVVVVVMMMMMMMMPPPPPPPSSSSSSPPPPPPPKKKKKKKKKVVVVVVVSSSSSSDDDDDDDDTTTTTTTVVVVVVVVVVVVVVEEEEEEEEEPPPPPPPYYYYYYYYYYYYNNNNNNNNAAAAATTTTTTTLLLLLLLLSSSSSSVVVVVVVHHHHHHHHHHQQQQQQQQQLLLLLLLLVVVVVVVEEEEEEEEENNNNNNNNTTTTTTTDDDDDDDDEEEEEEEEETTTTTTTYYYYYYYYYYYYCCCCCCIIIIIIIIDDDDDDDDNNNNNNNNEEEEEEEEEAAAAALLLLLLLLYYYYYYYYYYYYDDDDDDDDIIIIIIIICCCCCCFFFFFFFFFFFRRRRRRRRRRRTTTTTTTLLLLLLLLKKKKKKKKKLLLLLLLLTTTTTTTTTTTTTTPPPPPPPTTTTTTTYYYYYYYYYYYYGGGGDDDDDDDDLLLLLLLLNNNNNNNNHHHHHHHHHHLLLLLLLLVVVVVVVSSSSSSAAAAATTTTTTTMMMMMMMMSSSSSSGGGGVVVVVVVTTTTTTTTTTTTTTCCCCCCLLLLLLLLRRRRRRRRRRRFFFFFFFFFFFPPPPPPPGGGGQQQQQQQQQLLLLLLLLNNNNNNNNAAAAADDDDDDDDLLLLLLLLRRRRRRRRRRRKKKKKKKKKLLLLLLLLAAAAAVVVVVVVNNNNNNNNMMMMMMMMVVVVVVVPPPPPPPFFFFFFFFFFFPPPPPPPRRRRRRRRRRRLLLLLLLLHHHHHHHHHHFFFFFFFFFFFFFFFFFFFFFFMMMMMMMMPPPPPPPGGGGFFFFFFFFFFFAAAAAPPPPPPPLLLLLLLLTTTTTTTSSSSSSRRRRRRRRRRRGGGGSSSSSSQQQQQQQQQQQQQQQQQQYYYYYYYYYYYYRRRRRRRRRRRAAAAALLLLLLLLTTTTTTTVVVVVVVPPPPPPPEEEEEEEEELLLLLLLLTTTTTTTQQQQQQQQQQQQQQQQQQMMMMMMMMFFFFFFFFFFFDDDDDDDDSSSSSSKKKKKKKKKNNNNNNNNMMMMMMMMMMMMMMMMAAAAAAAAAACCCCCCDDDDDDDDPPPPPPPRRRRRRRRRRRHHHHHHHHHHGGGGRRRRRRRRRRRYYYYYYYYYYYYLLLLLLLLTTTTTTTVVVVVVVAAAAAAAAAAIIIIIIIIFFFFFFFFFFFRRRRRRRRRRRGGGGRRRRRRRRRRRMMMMMMMMSSSSSSMMMMMMMMKKKKKKKKKEEEEEEEEEVVVVVVVDDDDDDDDEEEEEEEEEQQQQQQQQQMMMMMMMMLLLLLLLLNNNNNNNNVVVVVVVQQQQQQQQQNNNNNNNNKKKKKKKKKSSSSSSSSSSSSSSSSSSYYYYYYYYYYYYFFFFFFFFFFFVVVVVVVEEEEEEEEEWWWWWWWWWWWWWWIIIIIIIIPPPPPPPNNNNNNNNNNNNNNNNVVVVVVVKKKKKKKKKTTTTTTTAAAAAVVVVVVVCCCCCCDDDDDDDDIIIIIIIIPPPPPPPPPPPPPPRRRRRRRRRRRGGGGLLLLLLLLKKKKKKKKKMMMMMMMMSSSSSSAAAAATTTTTTTFFFFFFFFFFFIIIIIIIIGGGGNNNNNNNNSSSSSSTTTTTTTAAAAAIIIIIIIIQQQQQQQQQEEEEEEEEELLLLLLLLFFFFFFFFFFFKKKKKKKKKRRRRRRRRRRRIIIIIIIISSSSSSEEEEEEEEEQQQQQQQQQFFFFFFFFFFFTTTTTTTAAAAAMMMMMMMMFFFFFFFFFFFRRRRRRRRRRRRRRRRRRRRRRKKKKKKKKKAAAAAFFFFFFFFFFFLLLLLLLLHHHHHHHHHHWWWWWWWWWWWWWWYYYYYYYYYYYYTTTTTTTGGGGEEEEEEEEEGGGGMMMMMMMMDDDDDDDDEEEEEEEEEMMMMMMMMEEEEEEEEEFFFFFFFFFFFTTTTTTTEEEEEEEEEAAAAAEEEEEEEEESSSSSSNNNNNNNNMMMMMMMMNNNNNNNNDDDDDDDDLLLLLLLLVVVVVVVSSSSSSEEEEEEEEEYYYYYYYYYYYYQQQQQQQQQQQQQQQQQQYYYYYYYYYYYYQQQQQQQQQDDDDDDDDAAAAATTTTTTTAAAAADDDDDDDDEEEEEEEEEQQQQQQQQQGGGGEEEEEEEEEFFFFFFFFFFFEEEEEEEEEEEEEEEEEEEEEEEEEEEEEEEEEEEEDDDDDDDDEEEEEEEEEAAAAAA

SEQ ID NO: 163 - protein, 1913 aa, Anemia phyllitidis
EEEEEEEEEAAAAALLLLLLLLYYYYYYYYYYYYDDDDDDDDIIIIIIIICCCCCCFFFFFFFFFFFRRRRRRRRRRRTTTTTTTLLLLLLLLKKKKKKKKKLLLLLLLLVVVVVVVTTTTTTTPPPPPPPTTTTTTTFFFFFFFFFFFGGGGDDDDDDDDLLLLLLLLNNNNNNNNHHHHHHHHHHLLLLLLLLIIIIIIIISSSSSSAAAAATTTTTTTMMMMMMMMSSSSSSGGGGVVVVVVVTTTTTTTCCCCCCCCCCCCLLLLLLLLRRRRRRRRRRRFFFFFFFFFFFPPPPPPPGGGGQQQQQQQQQLLLLLLLLNNNNNNNNSSSSSSDDDDDDDDLLLLLLLLRRRRRRRRRRRKKKKKKKKKLLLLLLLLAAAAAVVVVVVVNNNNNNNNLLLLLLLLIIIIIIIIPPPPPPPFFFFFFFFFFFPPPPPPPRRRRRRRRRRRLLLLLLLLHHHHHHHHHHFFFFFFFFFFFFFFFFFFFFFFMMMMMMMMVVVVVVVGGGGFFFFFFFFFFFAAAAAPPPPPPPLLLLLLLLTTTTTTTSSSSSSRRRRRRRRRRRGGGGSSSSSSQQQQQQQQQQQQQQQQQQYYYYYYYYYYYYRRRRRRRRRRRAAAAALLLLLLLLTTTTTTTVVVVVVVPPPPPPPEEEEEEEEELLLLLLLLTTTTTTTQQQQQQQQQQQQQQQQQQMMMMMMMMWWWWWWWWWWWWWWDDDDDDDDAAAAAKKKKKKKKKNNNNNNNNMMMMMMMMMMMMMMMMCCCCCCAAAAAAAAAADDDDDDDDPPPPPPPRRRRRRRRRRRHHHHHHHHHHGGGGRRRRRRRRRRRYYYYYYYYYYYYLLLLLLLLTTTTTTTAAAAASSSSSSAAAAAMMMMMMMMFFFFFFFFFFFRRRRRRRRRRRGGGGKKKKKKKKKMMMMMMMMSSSSSSTTTTTTTKKKKKKKKKEEEEEEEEEVVVVVVVDDDDDDDDEEEEEEEEEQQQQQQQQQLLLLLLLLIIIIIIIINNNNNNNNVVVVVVVQQQQQQQQQNNNNNNNNKKKKKKKKKNNNNNNNNSSSSSSSSSSSSYYYYYYYYYYYYFFFFFFFFFFFVVVVVVVEEEEEEEEEWWWWWWWWWWWWWWIIIIIIIIPPPPPPPNNNNNNNNNNNNNNNNVVVVVVVKKKKKKKKKSSSSSSSSSSSSVVVVVVVCCCCCCDDDDDDDDIIIIIIIIPPPPPPPPPPPPPPVVVVVVVGGGGLLLLLLLLKKKKKKKKKMMMMMMMMAAAAACCCCCCTTTTTTTFFFFFFFFFFFIIIIIIIIGGGGNNNNNNNNSSSSSSSSSSSSSSSSSSIIIIIIIIQQQQQQQQQEEEEEEEEEMMMMMMMMFFFFFFFFFFFRRRRRRRRRRRRRRRRRRRRRRDDDDDDDDAAAAATTTTTTTSSSSSSLLLLLLLLTTTTTTTAAAAAMMMMMMMMFFFFFFFFFFFRRRRRRRRRRRRRRRRRRRRRRKKKKKKKKKAAAAAFFFFFFFFFFFLLLLLLLLHHHHHHHHHHWWWWWWWWWWWWWWYYYYYYYYYYYYTTTTTTTWWWWWWWWWWWWWWEEEEEEEEEGGGGMMMMMMMMDDDDDDDDEEEEEEEEEMMMMMMMMEEEEEEEEEFFFFFFFFFFFTTTTTTTEEEEEEEEEEEEEEEEEEEEEEEEEEESSSSSSNNNNNNNNMMMMMMMMNNNNNNNNDDDDDDDDLLLLLLLLVVVVVVVSSSSSSEEEEEEEEEYYYYYYYYYYYYQQQQQQQQQQQQQQQQQQYYYYYYYYYYYYQQQQQQQQQDDDDDDDDAAAAASSSSSSAAAAAEEEEEEEEEPPPPPPPGGGGGGGGEEEEEEEEEQQQQQQQQQEEEEEEEEEEEEEEEEEEDDDDDDDDYYYYYYYYYYYYEEEEEEEEEEEEEEEEEEAAAAAA

SEQ ID NO: 164 - protein, 3498 aa, Gallus gallus
MMMMMMMMRRRRRRRRRRREEEEEEEEEIIIIIIIIVVVVVVVHHHHHHHHHHLLLLLLLLQQQQQQQQQAAAAAGGGGQQQQQQQQQCCCCCCGGGGNNNNNNNNQQQQQQQQQIIIIIIIIGGGGAAAAAKKKKKKKKKFFFFFFFFFFFWWWWWWWWWWWWWWEEEEEEEEEVVVVVVVIIIIIIIISSSSSSDDDDDDDDEEEEEEEEEHHHHHHHHHHGGGGIIIIIIIIDDDDDDDDPPPPPPPTTTTTTTGGGGTTTTTTTYYYYYYYYYYYYHHHHHHHHHHGGGGDDDDDDDDSSSSSSDDDDDDDDLLLLLLLLQQQQQQQQQLLLLLLLLEEEEEEEEERRRRRRRRRRRIIIIIIIINNNNNNNNVVVVVVVYYYYYYYYYYYYYYYYYYYYYYYYNNNNNNNNEEEEEEEEEAAAAATTTTTTTGGGGGGGGKKKKKKKKKYYYYYYYYYYYYVVVVVVVPPPPPPPRRRRRRRRRRRAAAAAVVVVVVVLLLLLLLLVVVVVVVDDDDDDDDLLLLLLLLEEEEEEEEEPPPPPPPGGGGTTTTTTTMMMMMMMMDDDDDDDDSSSSSSVVVVVVVRRRRRRRRRRRSSSSSSGGGGPPPPPPPFFFFFFFFFFFRRRRRRRRRRRQQQQQQQQQIIIIIIIIFFFFFFFFFFFRRRRRRRRRRRPPPPPPPDDDDDDDDNNNNNNNNFFFFFFFFFFFVVVVVVVFFFFFFFFFFFGGGGQQQQQQQQQSSSSSSGGGGAAAAAGGGGNNNNNNNNNNNNNNNNWWWWWWWWWWWWWWAAAAAKKKKKKKKKGGGGHHHHHHHHHHYYYYYYYYYYYYTTTTTTTEEEEEEEEEGGGGAAAAAEEEEEEEEELLLLLLLLVVVVVVVDDDDDDDDSSSSSSVVVVVVVLLLLLLLLDDDDDDDDVVVVVVVVVVVVVVRRRRRRRRRRRKKKKKKKKKEEEEEEEEEAAAAAEEEEEEEEESSSSSSCCCCCCDDDDDDDDCCCCCCLLLLLLLLQQQQQQQQQGGGGFFFFFFFFFFFQQQQQQQQQLLLLLLLLTTTTTTTHHHHHHHHHHSSSSSSLLLLLLLLGGGGGGGGGGGGTTTTTTTGGGGSSSSSSGGGGMMMMMMMMGGGGTTTTTTTLLLLLLLLLLLLLLLLIIIIIIIISSSSSSKKKKKKKKKIIIIIIIIRRRRRRRRRRREEEEEEEEEEEEEEEEEEYYYYYYYYYYYYPPPPPPPDDDDDDDDRRRRRRRRRRRIIIIIIIIMMMMMMMMNNNNNNNNTTTTTTTFFFFFFFFFFFSSSSSSVVVVVVVVVVVVVVPPPPPPPSSSSSSPPPPPPPKKKKKKKKKVVVVVVVSSSSSSDDDDDDDDTTTTTTTVVVVVVVVVVVVVVEEEEEEEEEPPPPPPPYYYYYYYYYYYYNNNNNNNNAAAAATTTTTTTLLLLLLLLSSSSSSVVVVVVVHHHHHHHHHHQQQQQQQQQLLLLLLLLVVVVVVVEEEEEEEEENNNNNNNNTTTTTTTDDDDDDDDEEEEEEEEETTTTTTTYYYYYYYYYYYYCCCCCCIIIIIIIIDDDDDDDDNNNNNNNNEEEEEEEEEAAAAALLLLLLLLYYYYYYYYYYYYDDDDDDDDIIIIIIIICCCCCCFFFFFFFFFFFRRRRRRRRRRRTTTTTTTLLLLLLLLKKKKKKKKKLLLLLLLLTTTTTTTTTTTTTTPPPPPPPTTTTTTTYYYYYYYYYYYYGGGGDDDDDDDDLLLLLLLLNNNNNNNNHHHHHHHHHHLLLLLLLLVVVVVVVSSSSSSAAAAATTTTTTTMMMMMMMMSSSSSSGGGGVVVVVVVTTTTTTTTTTTTTTCCCCCCLLLLLLLLRRRRRRRRRRRFFFFFFFFFFFPPPPPPPGGGGQQQQQQQQQLLLLLLLLNNNNNNNNAAAAADDDDDDDDLLLLLLLLRRRRRRRRRRRKKKKKKKKKLLLLLLLLAAAAAVVVVVVVNNNNNNNNMMMMMMMMVVVVVVVPPPPPPPFFFFFFFFFFFPPPPPPPRRRRRRRRRRRLLLLLLLLHHHHHHHHHHFFFFFFFFFFFFFFFFFFFFFFMMMMMMMMPPPPPPPGGGGFFFFFFFFFFFAAAAAPPPPPPPLLLLLLLLTTTTTTTSSSSSSRRRRRRRRRRRGGGGSSSSSSQQQQQQQQQQQQQQQQQQYYYYYYYYYYYYRRRRRRRRRRRAAAAALLLLLLLLTTTTTTTVVVVVVVPPPPPPPDDDDDDDDLLLLLLLLTTTTTTTQQQQQQQQQQQQQQQQQQMMMMMMMMFFFFFFFFFFFDDDDDDDDAAAAAKKKKKKKKKNNNNNNNNMMMMMMMMMMMMMMMMAAAAAAAAAACCCCCCEEEEEEEEEPPPPPPPGGGGHHHHHHHHHHGGGGRRRRRRRRRRRYYYYYYYYYYYYLLLLLLLLTTTTTTTVVVVVVVAAAAAAAAAAVVVVVVVFFFFFFFFFFFRRRRRRRRRRRGGGGRRRRRRRRRRRMMMMMMMMSSSSSSMMMMMMMMKKKKKKKKKEEEEEEEEEVVVVVVVDDDDDDDDEEEEEEEEEQQQQQQQQQMMMMMMMMLLLLLLLLNNNNNNNNVVVVVVVQQQQQQQQQNNNNNNNNKKKKKKKKKNNNNNNNNSSSSSSSSSSSSYYYYYYYYYYYYFFFFFFFFFFFVVVVVVVEEEEEEEEEWWWWWWWWWWWWWWIIIIIIIIPPPPPPPNNNNNNNNNNNNNNNNVVVVVVVKKKKKKKKKTTTTTTTAAAAAVVVVVVVCCCCCCDDDDDDDDIIIIIIIIPPPPPPPPPPPPPPRRRRRRRRRRRGGGGLLLLLLLLKKKKKKKKKMMMMMMMMSSSSSSAAAAATTTTTTTFFFFFFFFFFFIIIIIIIIGGGGNNNNNNNNSSSSSSTTTTTTTAAAAAIIIIIIIIQQQQQQQQQEEEEEEEEELLLLLLLLFFFFFFFFFFFKKKKKKKKKRRRRRRRRRRRIIIIIIIISSSSSSEEEEEEEEEQQQQQQQQQFFFFFFFFFFFTTTTTTTAAAAAMMMMMMMMFFFFFFFFFFFRRRRRRRRRRRRRRRRRRRRRRKKKKKKKKKAAAAAFFFFFFFFFFFLLLLLLLLHHHHHHHHHHWWWWWWWWWWWWWWYYYYYYYYYYYYTTTTTTTGGGGEEEEEEEEEGGGGMMMMMMMMDDDDDDDDEEEEEEEEEMMMMMMMMEEEEEEEEEFFFFFFFFFFFTTTTTTTEEEEEEEEEAAAAAEEEEEEEEESSSSSSNNNNNNNNMMMMMMMMNNNNNNNNDDDDDDDDLLLLLLLLVVVVVVVSSSSSSEEEEEEEEEYYYYYYYYYYYYQQQQQQQQQQQQQQQQQQYYYYYYYYYYYYQQQQQQQQQDDDDDDDDAAAAATTTTTTTAAAAAEEEEEEEEEEEEEEEEEEEEEEEEEEEGGGGEEEEEEEEEFFFFFFFFFFFEEEEEEEEEEEEEEEEEEEEEEEEEEEAAAAAEEEEEEEEEEEEEEEEEEEEEEEEEEEAAAAAEEEEEEEEEE

SEQ ID NO: 165 - protein, 3568 aa, Drosophila melanogaster
MMMMMMMMRRRRRRRRRRREEEEEEEEEIIIIIIIIVVVVVVVHHHHHHHHHHLLLLLLLLQQQQQQQQQAAAAAGGGGQQQQQQQQQCCCCCCGGGGNNNNNNNNQQQQQQQQQIIIIIIIIGGGGAAAAAKKKKKKKKKFFFFFFFFFFFWWWWWWWWWWWWWWEEEEEEEEEIIIIIIIIIIIIIIIISSSSSSEEEEEEEEEEEEEEEEEEHHHHHHHHHHGGGGIIIIIIIIDDDDDDDDSSSSSSNNNNNNNNGGGGIIIIIIIIYYYYYYYYYYYYVVVVVVVGGGGDDDDDDDDSSSSSSDDDDDDDDLLLLLLLLQQQQQQQQQLLLLLLLLEEEEEEEEERRRRRRRRRRRVVVVVVVSSSSSSVVVVVVVYYYYYYYYYYYYYYYYYYYYYYYYNNNNNNNNEEEEEEEEEAAAAASSSSSSAAAAAVVVVVVVTTTTTTTRRRRRRRRRRRSSSSSSSSSSSSGGGGGGGGKKKKKKKKKYYYYYYYYYYYYVVVVVVVPPPPPPPRRRRRRRRRRRAAAAAIIIIIIIILLLLLLLLLLLLLLLLDDDDDDDDLLLLLLLLEEEEEEEEEPPPPPPPGGGGTTTTTTTMMMMMMMMEEEEEEEEESSSSSSVVVVVVVRRRRRRRRRRRSSSSSSGGGGPPPPPPPYYYYYYYYYYYYGGGGQQQQQQQQQLLLLLLLLFFFFFFFFFFFRRRRRRRRRRRPPPPPPPDDDDDDDDNNNNNNNNFFFFFFFFFFFVVVVVVVYYYYYYYYYYYYGGGGQQQQQQQQQSSSSSSGGGGAAAAAGGGGNNNNNNNNNNNNNNNNWWWWWWWWWWWWWWAAAAAKKKKKKKKKGGGGHHHHHHHHHHYYYYYYYYYYYYTTTTTTTEEEEEEEEEGGGGAAAAAEEEEEEEEELLLLLLLLVVVVVVVDDDDDDDDNNNNNNNNVVVVVVVLLLLLLLLDDDDDDDDVVVVVVVVVVVVVVRRRRRRRRRRRKKKKKKKKKEEEEEEEEECCCCCCEEEEEEEEENNNNNNNNCCCCCCDDDDDDDDCCCCCCLLLLLLLLQQQQQQQQQGGGGFFFFFFFFFFFQQQQQQQQQLLLLLLLLTTTTTTTHHHHHHHHHHSSSSSSLLLLLLLLGGGGGGGGGGGGTTTTTTTGGGGSSSSSSGGGGMMMMMMMMGGGGTTTTTTTLLLLLLLLLLLLLLLLIIIIIIIISSSSSSKKKKKKKKKIIIIIIIIRRRRRRRRRRREEEEEEEEEEEEEEEEEEYYYYYYYYYYYYPPPPPPPDDDDDDDDRRRRRRRRRRRIIIIIIIIMMMMMMMMNNNNNNNNTTTTTTTYYYYYYYYYYYYSSSSSSVVVVVVVVVVVVVVPPPPPPPSSSSSSPPPPPPPKKKKKKKKKVVVVVVVSSSSSSDDDDDDDDTTTTTTTVVVVVVVVVVVVVVEEEEEEEEEPPPPPPPYYYYYYYYYYYYNNNNNNNNAAAAATTTTTTTLLLLLLLLSSSSSSIIIIIIIIHHHHHHHHHHQQQQQQQQQLLLLLLLLVVVVVVVEEEEEEEEENNNNNNNNTTTTTTTDDDDDDDDEEEEEEEEETTTTTTTYYYYYYYYYYYYCCCCCCIIIIIIIIDDDDDDDDNNNNNNNNEEEEEEEEEAAAAALLLLLLLLYYYYYYYYYYYYDDDDDDDDIIIIIIIICCCCCCFFFFFFFFFFFRRRRRRRRRRRTTTTTTTLLLLLLLLKKKKKKKKKVVVVVVVSSSSSSNNNNNNNNPPPPPPPSSSSSSYYYYYYYYYYYYGGGGDDDDDDDDLLLLLLLLNNNNNNNNHHHHHHHHHHLLLLLLLLVVVVVVVSSSSSSLLLLLLLLTTTTTTTMMMMMMMMSSSSSSGGGGVVVVVVVTTTTTTTTTTTTTTCCCCCCLLLLLLLLRRRRRRRRRRRFFFFFFFFFFFPPPPPPPGGGGQQQQQQQQQLLLLLLLLNNNNNNNNAAAAADDDDDDDDLLLLLLLLRRRRRRRRRRRKKKKKKKKKLLLLLLLLAAAAAVVVVVVVNNNNNNNNMMMMMMMMVVVVVVVPPPPPPPFFFFFFFFFFFPPPPPPPRRRRRRRRRRRLLLLLLLLHHHHHHHHHHFFFFFFFFFFFFFFFFFFFFFFMMMMMMMMPPPPPPPGGGGFFFFFFFFFFFAAAAAPPPPPPPLLLLLLLLTTTTTTTSSSSSSRRRRRRRRRRRGGGGSSSSSSQQQQQQQQQQQQQQQQQQYYYYYYYYYYYYRRRRRRRRRRRAAAAALLLLLLLLTTTTTTTVVVVVVVPPPPPPPEEEEEEEEELLLLLLLLTTTTTTTQQQQQQQQQQQQQQQQQQMMMMMMMMFFFFFFFFFFFDDDDDDDDAAAAAKKKKKKKKKNNNNNNNNMMMMMMMMMMMMMMMMAAAAAAAAAACCCCCCDDDDDDDDPPPPPPPRRRRRRRRRRRHHHHHHHHHHGGGGRRRRRRRRRRRYYYYYYYYYYYYLLLLLLLLTTTTTTTVVVVVVVAAAAAAAAAAVVVVVVVFFFFFFFFFFFRRRRRRRRRRRGGGGRRRRRRRRRRRMMMMMMMMSSSSSSMMMMMMMMKKKKKKKKKEEEEEEEEEVVVVVVVDDDDDDDDEEEEEEEEEQQQQQQQQQMMMMMMMMLLLLLLLLAAAAAVVVVVVVQQQQQQQQQNNNNNNNNKKKKKKKKKNNNNNNNNSSSSSSSSSSSSYYYYYYYYYYYYFFFFFFFFFFFVVVVVVVEEEEEEEEEWWWWWWWWWWWWWWIIIIIIIIPPPPPPPNNNNNNNNNNNNNNNNVVVVVVVKKKKKKKKKTTTTTTTAAAAAVVVVVVVCCCCCCDDDDDDDDIIIIIIIIPPPPPPPPPPPPPPRRRRRRRRRRRGGGGLLLLLLLLKKKKKKKKKMMMMMMMMSSSSSSSSSSSSTTTTTTTFFFFFFFFFFFIIIIIIIIGGGGNNNNNNNNTTTTTTTTTTTTTTAAAAAIIIIIIIIQQQQQQQQQEEEEEEEEELLLLLLLLFFFFFFFFFFFKKKKKKKKKRRRRRRRRRRRIIIIIIIISSSSSSEEEEEEEEEQQQQQQQQQFFFFFFFFFFFSSSSSSAAAAAMMMMMMMMFFFFFFFFFFFRRRRRRRRRRRRRRRRRRRRRRKKKKKKKKKAAAAAFFFFFFFFFFFLLLLLLLLHHHHHHHHHHWWWWWWWWWWWWWWYYYYYYYYYYYYTTTTTTTGGGGEEEEEEEEEGGGGMMMMMMMMDDDDDDDDEEEEEEEEEMMMMMMMMEEEEEEEEEFFFFFFFFFFFTTTTTTTEEEEEEEEEAAAAAEEEEEEEEESSSSSSNNNNNNNNMMMMMMMMNNNNNNNNDDDDDDDDLLLLLLLLVVVVVVVSSSSSSEEEEEEEEEYYYYYYYYYYYYQQQQQQQQQQQQQQQQQQYYYYYYYYYYYYQQQQQQQQQEEEEEEEEEAAAAATTTTTTTAAAAADDDDDDDDDDDDDDDDEEEEEEEEEFFFFFFFFFFFDDDDDDDDPPPPPPPEEEEEEEEEVVVVVVVNNNNNNNNQQQQQQQQQEEEEEEEEEEEEEEEEEEVVVVVVVEEEEEEEEEGGGGDDDDDDDDCCCCCCIIIIIIIII

SEQ ID NO: 166 - protein, 3508 aa, Eleusine indica
MMMMMMMMRRRRRRRRRRREEEEEEEEEIIIIIIIILLLLLLLLHHHHHHHHHHIIIIIIIIQQQQQQQQQGGGGGGGGQQQQQQQQQCCCCCCGGGGNNNNNNNNQQQQQQQQQIIIIIIIIGGGGAAAAAKKKKKKKKKFFFFFFFFFFFWWWWWWWWWWWWWWEEEEEEEEEVVVVVVVIIIIIIIICCCCCCDDDDDDDDEEEEEEEEEHHHHHHHHHHGGGGIIIIIIIIDDDDDDDDHHHHHHHHHHTTTTTTTGGGGKKKKKKKKKYYYYYYYYYYYYAAAAAGGGGDDDDDDDDSSSSSSDDDDDDDDLLLLLLLLQQQQQQQQQLLLLLLLLEEEEEEEEERRRRRRRRRRRIIIIIIIINNNNNNNNVVVVVVVYYYYYYYYYYYYYYYYYYYYYYYYNNNNNNNNEEEEEEEEEAAAAAGGGGGGGGGGGGRRRRRRRRRRRFFFFFFFFFFFVVVVVVVPPPPPPPRRRRRRRRRRRAAAAAVVVVVVVLLLLLLLLMMMMMMMMDDDDDDDDLLLLLLLLEEEEEEEEEPPPPPPPGGGGTTTTTTTMMMMMMMMDDDDDDDDSSSSSSLLLLLLLLRRRRRRRRRRRSSSSSSGGGGPPPPPPPYYYYYYYYYYYYGGGGQQQQQQQQQIIIIIIIIFFFFFFFFFFFRRRRRRRRRRRPPPPPPPDDDDDDDDNNNNNNNNFFFFFFFFFFFVVVVVVVFFFFFFFFFFFGGGGQQQQQQQQQSSSSSSGGGGAAAAAGGGGNNNNNNNNNNNNNNNNWWWWWWWWWWWWWWAAAAAKKKKKKKKKGGGGHHHHHHHHHHYYYYYYYYYYYYTTTTTTTEEEEEEEEEGGGGAAAAAEEEEEEEEELLLLLLLLIIIIIIIIDDDDDDDDSSSSSSVVVVVVVLLLLLLLLDDDDDDDDVVVVVVVVVVVVVVRRRRRRRRRRRKKKKKKKKKEEEEEEEEEAAAAAEEEEEEEEENNNNNNNNCCCCCCDDDDDDDDCCCCCCLLLLLLLLQQQQQQQQQGGGGFFFFFFFFFFFQQQQQQQQQVVVVVVVCCCCCCHHHHHHHHHHSSSSSSLLLLLLLLGGGGGGGGGGGGTTTTTTTGGGGSSSSSSGGGGMMMMMMMMGGGGTTTTTTTLLLLLLLLLLLLLLLLIIIIIIIISSSSSSKKKKKKKKKIIIIIIIIRRRRRRRRRRREEEEEEEEEEEEEEEEEEYYYYYYYYYYYYPPPPPPPDDDDDDDDRRRRRRRRRRRMMMMMMMMMMMMMMMMLLLLLLLLTTTTTTTFFFFFFFFFFFSSSSSSVVVVVVVFFFFFFFFFFFPPPPPPPSSSSSSPPPPPPPKKKKKKKKKVVVVVVVSSSSSSDDDDDDDDTTTTTTTVVVVVVVVVVVVVVEEEEEEEEEPPPPPPPYYYYYYYYYYYYNNNNNNNNAAAAATTTTTTTLLLLLLLLSSSSSSVVVVVVVHHHHHHHHHHQQQQQQQQQLLLLLLLLVVVVVVVEEEEEEEEENNNNNNNNAAAAADDDDDDDDEEEEEEEEECCCCCCMMMMMMMMVVVVVVVLLLLLLLLDDDDDDDDNNNNNNNNEEEEEEEEEAAAAALLLLLLLLYYYYYYYYYYYYDDDDDDDDIIIIIIIICCCCCCFFFFFFFFFFFRRRRRRRRRRRTTTTTTTLLLLLLLLKKKKKKKKKLLLLLLLLAAAAATTTTTTTPPPPPPPTTTTTTTFFFFFFFFFFFGGGGDDDDDDDDLLLLLLLLNNNNNNNNHHHHHHHHHHLLLLLLLLIIIIIIIISSSSSSAAAAATTTTTTTMMMMMMMMSSSSSSGGGGVVVVVVVTTTTTTTCCCCCCCCCCCCLLLLLLLLRRRRRRRRRRRFFFFFFFFFFFPPPPPPPGGGGQQQQQQQQQLLLLLLLLNNNNNNNNSSSSSSDDDDDDDDLLLLLLLLRRRRRRRRRRRKKKKKKKKKLLLLLLLLAAAAAVVVVVVVNNNNNNNNLLLLLLLLIIIIIIIIPPPPPPPFFFFFFFFFFFPPPPPPPRRRRRRRRRRRLLLLLLLLHHHHHHHHHHFFFFFFFFFFFFFFFFFFFFFFMMMMMMMMVVVVVVVGGGGFFFFFFFFFFFAAAAAPPPPPPPLLLLLLLLTTTTTTTSSSSSSRRRRRRRRRRRGGGGSSSSSSQQQQQQQQQQQQQQQQQQYYYYYYYYYYYYRRRRRRRRRRRSSSSSSLLLLLLLLTTTTTTTVVVVVVVPPPPPPPEEEEEEEEELLLLLLLLTTTTTTTQQQQQQQQQQQQQQQQQQMMMMMMMMWWWWWWWWWWWWWWDDDDDDDDAAAAAKKKKKKKKKNNNNNNNNMMMMMMMMMMMMMMMMCCCCCCAAAAAAAAAADDDDDDDDPPPPPPPRRRRRRRRRRRHHHHHHHHHHGGGGRRRRRRRRRRRYYYYYYYYYYYYLLLLLLLLTTTTTTTAAAAASSSSSSAAAAAMMMMMMMMFFFFFFFFFFFRRRRRRRRRRRGGGGKKKKKKKKKMMMMMMMMSSSSSSTTTTTTTKKKKKKKKKEEEEEEEEEVVVVVVVDDDDDDDDEEEEEEEEEQQQQQQQQQMMMMMMMMLLLLLLLLNNNNNNNNVVVVVVVQQQQQQQQQNNNNNNNNKKKKKKKKKNNNNNNNNSSSSSSSSSSSSYYYYYYYYYYYYFFFFFFFFFFFVVVVVVVEEEEEEEEEWWWWWWWWWWWWWWIIIIIIIIPPPPPPPNNNNNNNNNNNNNNNNVVVVVVVKKKKKKKKKSSSSSSSSSSSSVVVVVVVCCCCCCDDDDDDDDIIIIIIIIPPPPPPPPPPPPPPRRRRRRRRRRRGGGGLLLLLLLLTTTTTTTMMMMMMMMSSSSSSSSSSSSTTTTTTTFFFFFFFFFFFIIIIIIIIGGGGNNNNNNNNSSSSSSTTTTTTTSSSSSSIIIIIIIIQQQQQQQQQEEEEEEEEEMMMMMMMMFFFFFFFFFFFRRRRRRRRRRRRRRRRRRRRRRVVVVVVVSSSSSSEEEEEEEEEQQQQQQQQQFFFFFFFFFFFTTTTTTTAAAAAMMMMMMMMFFFFFFFFFFFRRRRRRRRRRRRRRRRRRRRRRKKKKKKKKKAAAAAFFFFFFFFFFFLLLLLLLLHHHHHHHHHHWWWWWWWWWWWWWWYYYYYYYYYYYYTTTTTTTGGGGEEEEEEEEEGGGGMMMMMMMMDDDDDDDDEEEEEEEEEMMMMMMMMEEEEEEEEEFFFFFFFFFFFTTTTTTTEEEEEEEEEAAAAAEEEEEEEEESSSSSSNNNNNNNNMMMMMMMMNNNNNNNNDDDDDDDDLLLLLLLLVVVVVVVAAAAAEEEEEEEEEYYYYYYYYYYYYQQQQQQQQQQQQQQQQQQYYYYYYYYYYYYQQQQQQQQQDDDDDDDDAAAAATTTTTTTAAAAAEEEEEEEEEEEEEEEEEEEEEEEEEEEEEEEEEEEEEEEEEEEEEYYYYYYYYYYYYDDDDDDDDDDDDDDDDDDDDDDDDEEEEEEEEEEEEEEEEEEEEEEEEEEEEEEEEEEEEVVVVVVVAAAAAAAAAAA

SEQ ID NO: 167 - protein, 3486 aa, Zea mays
MMMMMMMMRRRRRRRRRRREEEEEEEEEIIIIIIIILLLLLLLLHHHHHHHHHHIIIIIIIIQQQQQQQQQGGGGGGGGQQQQQQQQQCCCCCCGGGGNNNNNNNNQQQQQQQQQIIIIIIIIGGGGAAAAAKKKKKKKKKFFFFFFFFFFFWWWWWWWWWWWWWWEEEEEEEEEVVVVVVVIIIIIIIICCCCCCGGGGEEEEEEEEEHHHHHHHHHHGGGGVVVVVVVDDDDDDDDSSSSSSTTTTTTTGGGGCCCCCCYYYYYYYYYYYYSSSSSSGGGGVVVVVVVSSSSSSPPPPPPPQQQQQQQQQQQQQQQQQQLLLLLLLLEEEEEEEEERRRRRRRRRRRIIIIIIIINNNNNNNNVVVVVVVYYYYYYYYYYYYYYYYYYYYYYYYNNNNNNNNEEEEEEEEEAAAAAGGGGGGGGGGGGRRRRRRRRRRRYYYYYYYYYYYYVVVVVVVPPPPPPPRRRRRRRRRRRAAAAAVVVVVVVLLLLLLLLMMMMMMMMDDDDDDDDLLLLLLLLEEEEEEEEEPPPPPPPGGGGTTTTTTTMMMMMMMMEEEEEEEEESSSSSSIIIIIIIIRRRRRRRRRRRAAAAAGGGGPPPPPPPFFFFFFFFFFFGGGGGGGGIIIIIIIIFFFFFFFFFFFRRRRRRRRRRRPPPPPPPDDDDDDDDNNNNNNNNFFFFFFFFFFFVVVVVVVYYYYYYYYYYYYGGGGQQQQQQQQQSSSSSSGGGGAAAAAGGGGNNNNNNNNNNNNNNNNWWWWWWWWWWWWWWAAAAAKKKKKKKKKGGGGHHHHHHHHHHYYYYYYYYYYYYTTTTTTTEEEEEEEEEGGGGAAAAAEEEEEEEEELLLLLLLLIIIIIIIIDDDDDDDDSSSSSSVVVVVVVLLLLLLLLDDDDDDDDVVVVVVVVVVVVVVRRRRRRRRRRRKKKKKKKKKEEEEEEEEEAAAAAEEEEEEEEENNNNNNNNCCCCCCDDDDDDDDCCCCCCLLLLLLLLQQQQQQQQQGGGGFFFFFFFFFFFQQQQQQQQQVVVVVVVCCCCCCHHHHHHHHHHSSSSSSLLLLLLLLGGGGGGGGGGGGTTTTTTTGGGGSSSSSSGGGGMMMMMMMMGGGGTTTTTTTLLLLLLLLLLLLLLLLIIIIIIIISSSSSSKKKKKKKKKIIIIIIIIRRRRRRRRRRREEEEEEEEEEEEEEEEEEYYYYYYYYYYYYPPPPPPPDDDDDDDDRRRRRRRRRRRMMMMMMMMMMMMMMMMLLLLLLLLTTTTTTTFFFFFFFFFFFSSSSSSVVVVVVVFFFFFFFFFFFPPPPPPPSSSSSSPPPPPPPKKKKKKKKKVVVVVVVSSSSSSDDDDDDDDTTTTTTTVVVVVVVVVVVVVVEEEEEEEEEPPPPPPPYYYYYYYYYYYYNNNNNNNNAAAAATTTTTTTLLLLLLLLSSSSSSVVVVVVVHHHHHHHHHHQQQQQQQQQLLLLLLLLVVVVVVVEEEEEEEEENNNNNNNNAAAAADDDDDDDDEEEEEEEEECCCCCCMMMMMMMMVVVVVVVLLLLLLLLDDDDDDDDNNNNNNNNEEEEEEEEEAAAAALLLLLLLLYYYYYYYYYYYYDDDDDDDDIIIIIIIICCCCCCFFFFFFFFFFFRRRRRRRRRRRTTTTTTTLLLLLLLLKKKKKKKKKLLLLLLLLTTTTTTTNNNNNNNNPPPPPPPSSSSSSFFFFFFFFFFFGGGGDDDDDDDDLLLLLLLLNNNNNNNNHHHHHHHHHHLLLLLLLLIIIIIIIISSSSSSAAAAATTTTTTTMMMMMMMMSSSSSSGGGGVVVVVVVTTTTTTTCCCCCCCCCCCCLLLLLLLLRRRRRRRRRRRFFFFFFFFFFFPPPPPPPGGGGQQQQQQQQQLLLLLLLLNNNNNNNNSSSSSSDDDDDDDDLLLLLLLLRRRRRRRRRRRKKKKKKKKKLLLLLLLLAAAAAVVVVVVVNNNNNNNNLLLLLLLLIIIIIIIIPPPPPPPFFFFFFFFFFFPPPPPPPRRRRRRRRRRRLLLLLLLLHHHHHHHHHHFFFFFFFFFFFFFFFFFFFFFFMMMMMMMMVVVVVVVGGGGFFFFFFFFFFFAAAAAPPPPPPPLLLLLLLLTTTTTTTSSSSSSRRRRRRRRRRRGGGGSSSSSSQQQQQQQQQQQQQQQQQQYYYYYYYYYYYYRRRRRRRRRRRAAAAALLLLLLLLTTTTTTTVVVVVVVPPPPPPPEEEEEEEEELLLLLLLLTTTTTTTQQQQQQQQQQQQQQQQQQMMMMMMMMWWWWWWWWWWWWWWDDDDDDDDAAAAAKKKKKKKKKNNNNNNNNMMMMMMMMMMMMMMMMCCCCCCAAAAAAAAAADDDDDDDDPPPPPPPRRRRRRRRRRRHHHHHHHHHHGGGGRRRRRRRRRRRYYYYYYYYYYYYLLLLLLLLTTTTTTTAAAAASSSSSSAAAAAMMMMMMMMFFFFFFFFFFFRRRRRRRRRRRGGGGKKKKKKKKKMMMMMMMMSSSSSSTTTTTTTKKKKKKKKKEEEEEEEEEVVVVVVVDDDDDDDDEEEEEEEEEQQQQQQQQQMMMMMMMMIIIIIIIINNNNNNNNVVVVVVVQQQQQQQQQNNNNNNNNKKKKKKKKKNNNNNNNNSSSSSSSSSSSSYYYYYYYYYYYYFFFFFFFFFFFVVVVVVVEEEEEEEEEWWWWWWWWWWWWWWIIIIIIIIPPPPPPPNNNNNNNNNNNNNNNNVVVVVVVKKKKKKKKKSSSSSSSSSSSSVVVVVVVCCCCCCDDDDDDDDIIIIIIIIPPPPPPPPPPPPPPVVVVVVVGGGGLLLLLLLLSSSSSSMMMMMMMMSSSSSSSSSSSSTTTTTTTFFFFFFFFFFFVVVVVVVGGGGNNNNNNNNSSSSSSTTTTTTTSSSSSSIIIIIIIIQQQQQQQQQEEEEEEEEEMMMMMMMMFFFFFFFFFFFRRRRRRRRRRRRRRRRRRRRRRVVVVVVVSSSSSSEEEEEEEEEQQQQQQQQQFFFFFFFFFFFTTTTTTTAAAAAMMMMMMMMFFFFFFFFFFFRRRRRRRRRRRRRRRRRRRRRRKKKKKKKKKAAAAAFFFFFFFFFFFLLLLLLLLHHHHHHHHHHWWWWWWWWWWWWWWYYYYYYYYYYYYTTTTTTTSSSSSSEEEEEEEEEGGGGMMMMMMMMDDDDDDDDEEEEEEEEEMMMMMMMMEEEEEEEEEFFFFFFFFFFFTTTTTTTEEEEEEEEEAAAAAEEEEEEEEESSSSSSNNNNNNNNMMMMMMMMNNNNNNNNDDDDDDDDLLLLLLLLVVVVVVVAAAAAEEEEEEEEEYYYYYYYYYYYYQQQQQQQQQQQQQQQQQQYYYYYYYYYYYYQQQQQQQQQDDDDDDDDAAAAATTTTTTTAAAAAEEEEEEEEEEEEEEEEEEYYYYYYYYYYYYDDDDDDDDEEEEEEEEEEEEEEEEEEEEEEEEEEEQQQQQQQQQDDDDDDDDGGGGEEEEEEEEEEEEEEEEEEEEEEEEEEEHHHHHHHHHHDDDDDDDDD

SEQ ID NO: 168 - protein, 3508 aa, Oryza sativa
MMMMMMMMRRRRRRRRRRREEEEEEEEEIIIIIIIILLLLLLLLHHHHHHHHHHIIIIIIIIQQQQQQQQQGGGGGGGGQQQQQQQQQCCCCCCGGGGNNNNNNNNQQQQQQQQQIIIIIIIIGGGGAAAAAKKKKKKKKKFFFFFFFFFFFWWWWWWWWWWWWWWEEEEEEEEEVVVVVVVIIIIIIIICCCCCCDDDDDDDDEEEEEEEEEHHHHHHHHHHGGGGIIIIIIIIDDDDDDDDHHHHHHHHHHTTTTTTTGGGGKKKKKKKKKYYYYYYYYYYYYSSSSSSGGGGDDDDDDDDSSSSSSDDDDDDDDLLLLLLLLQQQQQQQQQLLLLLLLLEEEEEEEEERRRRRRRRRRRIIIIIIIINNNNNNNNVVVVVVVYYYYYYYYYYYYYYYYYYYYYYYYNNNNNNNNEEEEEEEEEAAAAASSSSSSGGGGGGGGRRRRRRRRRRRFFFFFFFFFFFVVVVVVVPPPPPPPRRRRRRRRRRRAAAAAVVVVVVVLLLLLLLLMMMMMMMMDDDDDDDDLLLLLLLLEEEEEEEEEPPPPPPPGGGGTTTTTTTMMMMMMMMDDDDDDDDSSSSSSVVVVVVVRRRRRRRRRRRSSSSSSGGGGPPPPPPPFFFFFFFFFFFGGGGQQQQQQQQQIIIIIIIIFFFFFFFFFFFRRRRRRRRRRRPPPPPPPDDDDDDDDNNNNNNNNFFFFFFFFFFFVVVVVVVFFFFFFFFFFFGGGGQQQQQQQQQSSSSSSGGGGAAAAAGGGGNNNNNNNNNNNNNNNNWWWWWWWWWWWWWWAAAAAKKKKKKKKKGGGGHHHHHHHHHHYYYYYYYYYYYYTTTTTTTEEEEEEEEEGGGGAAAAAEEEEEEEEELLLLLLLLIIIIIIIIDDDDDDDDSSSSSSVVVVVVVLLLLLLLLDDDDDDDDVVVVVVVVVVVVVVRRRRRRRRRRRKKKKKKKKKEEEEEEEEEAAAAAEEEEEEEEENNNNNNNNCCCCCCDDDDDDDDCCCCCCLLLLLLLLQQQQQQQQQGGGGFFFFFFFFFFFQQQQQQQQQVVVVVVVCCCCCCHHHHHHHHHHSSSSSSLLLLLLLLGGGGGGGGGGGGTTTTTTTGGGGSSSSSSGGGGMMMMMMMMGGGGTTTTTTTLLLLLLLLLLLLLLLLIIIIIIIISSSSSSKKKKKKKKKIIIIIIIIRRRRRRRRRRREEEEEEEEEEEEEEEEEEYYYYYYYYYYYYPPPPPPPDDDDDDDDRRRRRRRRRRRMMMMMMMMMMMMMMMMLLLLLLLLTTTTTTTFFFFFFFFFFFSSSSSSVVVVVVVFFFFFFFFFFFPPPPPPPSSSSSSPPPPPPPKKKKKKKKKVVVVVVVSSSSSSDDDDDDDDTTTTTTTVVVVVVVVVVVVVVEEEEEEEEEPPPPPPPYYYYYYYYYYYYNNNNNNNNAAAAATTTTTTTLLLLLLLLSSSSSSVVVVVVVHHHHHHHHHHQQQQQQQQQLLLLLLLLVVVVVVVEEEEEEEEENNNNNNNNAAAAADDDDDDDDEEEEEEEEECCCCCCMMMMMMMMVVVVVVVLLLLLLLLDDDDDDDDNNNNNNNNEEEEEEEEEAAAAALLLLLLLLYYYYYYYYYYYYDDDDDDDDIIIIIIIICCCCCCFFFFFFFFFFFRRRRRRRRRRRTTTTTTTLLLLLLLLKKKKKKKKKLLLLLLLLAAAAATTTTTTTPPPPPPPTTTTTTTFFFFFFFFFFFGGGGDDDDDDDDLLLLLLLLNNNNNNNNHHHHHHHHHHLLLLLLLLIIIIIIIISSSSSSAAAAATTTTTTTMMMMMMMMSSSSSSGGGGVVVVVVVTTTTTTTCCCCCCCCCCCCLLLLLLLLRRRRRRRRRRRFFFFFFFFFFFPPPPPPPGGGGQQQQQQQQQLLLLLLLLNNNNNNNNSSSSSSDDDDDDDDLLLLLLLLRRRRRRRRRRRKKKKKKKKKLLLLLLLLAAAAAVVVVVVVNNNNNNNNLLLLLLLLIIIIIIIIPPPPPPPFFFFFFFFFFFPPPPPPPRRRRRRRRRRRLLLLLLLLHHHHHHHHHHFFFFFFFFFFFFFFFFFFFFFFMMMMMMMMVVVVVVVGGGGFFFFFFFFFFFAAAAAPPPPPPPLLLLLLLLTTTTTTTSSSSSSRRRRRRRRRRRGGGGSSSSSSQQQQQQQQQQQQQQQQQQYYYYYYYYYYYYRRRRRRRRRRRAAAAALLLLLLLLTTTTTTTVVVVVVVPPPPPPPEEEEEEEEELLLLLLLLTTTTTTTQQQQQQQQQQQQQQQQQQMMMMMMMMWWWWWWWWWWWWWWDDDDDDDDAAAAAKKKKKKKKKNNNNNNNNMMMMMMMMMMMMMMMMCCCCCCAAAAAAAAAADDDDDDDDPPPPPPPRRRRRRRRRRRHHHHHHHHHHGGGGRRRRRRRRRRRYYYYYYYYYYYYLLLLLLLLTTTTTTTAAAAASSSSSSAAAAAMMMMMMMMFFFFFFFFFFFRRRRRRRRRRRGGGGKKKKKKKKKMMMMMMMMSSSSSSTTTTTTTKKKKKKKKKEEEEEEEEEVVVVVVVDDDDDDDDEEEEEEEEEQQQQQQQQQMMMMMMMMLLLLLLLLNNNNNNNNVVVVVVVQQQQQQQQQNNNNNNNNKKKKKKKKKNNNNNNNNSSSSSSSSSSSSYYYYYYYYYYYYFFFFFFFFFFFVVVVVVVEEEEEEEEEWWWWWWWWWWWWWWIIIIIIIIPPPPPPPNNNNNNNNNNNNNNNNVVVVVVVKKKKKKKKKSSSSSSSSSSSSVVVVVVVCCCCCCDDDDDDDDIIIIIIIIPPPPPPPPPPPPPPNNNNNNNNGGGGLLLLLLLLKKKKKKKKKMMMMMMMMAAAAASSSSSSTTTTTTTFFFFFFFFFFFIIIIIIIIGGGGNNNNNNNNSSSSSSTTTTTTTSSSSSSIIIIIIIIQQQQQQQQQEEEEEEEEEMMMMMMMMFFFFFFFFFFFRRRRRRRRRRRRRRRRRRRRRRVVVVVVVSSSSSSEEEEEEEEEQQQQQQQQQFFFFFFFFFFFTTTTTTTAAAAAMMMMMMMMFFFFFFFFFFFRRRRRRRRRRRRRRRRRRRRRRKKKKKKKKKAAAAAFFFFFFFFFFFLLLLLLLLHHHHHHHHHHWWWWWWWWWWWWWWYYYYYYYYYYYYTTTTTTTGGGGEEEEEEEEEGGGGMMMMMMMMDDDDDDDDEEEEEEEEEMMMMMMMMEEEEEEEEEFFFFFFFFFFFTTTTTTTEEEEEEEEEAAAAAEEEEEEEEESSSSSSNNNNNNNNMMMMMMMMNNNNNNNNDDDDDDDDLLLLLLLLVVVVVVVAAAAAEEEEEEEEEYYYYYYYYYYYYQQQQQQQQQQQQQQQQQQYYYYYYYYYYYYQQQQQQQQQDDDDDDDDAAAAATTTTTTTAAAAADDDDDDDDDDDDDDDDEEEEEEEEEEEEEEEEEEEEEEEEEEEDDDDDDDDYYYYYYYYYYYYGGGGDDDDDDDDEEEEEEEEEEEEEEEEEEEEEEEEEEEDDDDDDDDEEEEEEEEEVVVVVVVAAAAAAAAAAA

SEQ ID NO: 169 - protein, 3466 aa, Pisum sativum
GGGGQQQQQQQQQCCCCCCGGGGNNNNNNNNQQQQQQQQQIIIIIIIIGGGGSSSSSSKKKKKKKKKFFFFFFFFFFFWWWWWWWWWWWWWWEEEEEEEEEVVVVVVVVVVVVVVCCCCCCDDDDDDDDEEEEEEEEEHHHHHHHHHHGGGGIIIIIIIIDDDDDDDDPPPPPPPTTTTTTTGGGGRRRRRRRRRRRYYYYYYYYYYYYVVVVVVVGGGGNNNNNNNNSSSSSSDDDDDDDDLLLLLLLLQQQQQQQQQLLLLLLLLEEEEEEEEERRRRRRRRRRRVVVVVVVNNNNNNNNVVVVVVVYYYYYYYYYYYYYYYYYYYYYYYYNNNNNNNNEEEEEEEEEAAAAASSSSSSCCCCCCGGGGRRRRRRRRRRRFFFFFFFFFFFVVVVVVVPPPPPPPRRRRRRRRRRRAAAAAIIIIIIIILLLLLLLLMMMMMMMMDDDDDDDDLLLLLLLLEEEEEEEEEPPPPPPPGGGGTTTTTTTMMMMMMMMDDDDDDDDSSSSSSVVVVVVVRRRRRRRRRRRTTTTTTTGGGGPPPPPPPYYYYYYYYYYYYGGGGQQQQQQQQQIIIIIIIIFFFFFFFFFFFRRRRRRRRRRRPPPPPPPDDDDDDDDNNNNNNNNFFFFFFFFFFFVVVVVVVFFFFFFFFFFFGGGGQQQQQQQQQSSSSSSGGGGAAAAAGGGGNNNNNNNNNNNNNNNNWWWWWWWWWWWWWWAAAAAKKKKKKKKKGGGGHHHHHHHHHHYYYYYYYYYYYYTTTTTTTEEEEEEEEEGGGGAAAAAEEEEEEEEELLLLLLLLIIIIIIIIDDDDDDDDSSSSSSVVVVVVVLLLLLLLLDDDDDDDDVVVVVVVVVVVVVVRRRRRRRRRRRKKKKKKKKKEEEEEEEEEAAAAAEEEEEEEEENNNNNNNNCCCCCCDDDDDDDDCCCCCCLLLLLLLLQQQQQQQQQGGGGFFFFFFFFFFFQQQQQQQQQVVVVVVVCCCCCCHHHHHHHHHHSSSSSSLLLLLLLLGGGGGGGGGGGGTTTTTTTGGGGSSSSSSGGGGMMMMMMMMGGGGTTTTTTTLLLLLLLLLLLLLLLLIIIIIIIISSSSSSKKKKKKKKKIIIIIIIIRRRRRRRRRRREEEEEEEEEEEEEEEEEEYYYYYYYYYYYYPPPPPPPDDDDDDDDRRRRRRRRRRRMMMMMMMMMMMMMMMMLLLLLLLLTTTTTTTFFFFFFFFFFFSSSSSSVVVVVVVFFFFFFFFFFFPPPPPPPSSSSSSPPPPPPPKKKKKKKKKVVVVVVVSSSSSSDDDDDDDDTTTTTTTVVVVVVVVVVVVVVEEEEEEEEEPPPPPPPYYYYYYYYYYYYNNNNNNNNAAAAATTTTTTTLLLLLLLLSSSSSSVVVVVVVHHHHHHHHHHQQQQQQQQQLLLLLLLLVVVVVVVEEEEEEEEENNNNNNNNAAAAADDDDDDDDEEEEEEEEECCCCCCMMMMMMMMVVVVVVVLLLLLLLLDDDDDDDDNNNNNNNNEEEEEEEEEAAAAALLLLLLLLYYYYYYYYYYYYDDDDDDDDIIIIIIIICCCCCCFFFFFFFFFFFRRRRRRRRRRRTTTTTTTLLLLLLLLKKKKKKKKKLLLLLLLLTTTTTTTTTTTTTTPPPPPPPSSSSSSFFFFFFFFFFFGGGGDDDDDDDDLLLLLLLLNNNNNNNNHHHHHHHHHHLLLLLLLLIIIIIIIISSSSSSAAAAATTTTTTTMMMMMMMMSSSSSSGGGGVVVVVVVTTTTTTTCCCCCCCCCCCCLLLLLLLLRRRRRRRRRRRFFFFFFFFFFFPPPPPPPGGGGQQQQQQQQQLLLLLLLLNNNNNNNNSSSSSSDDDDDDDDLLLLLLLLRRRRRRRRRRRKKKKKKKKKLLLLLLLLAAAAAVVVVVVVNNNNNNNNLLLLLLLLIIIIIIIIPPPPPPPFFFFFFFFFFFPPPPPPPRRRRRRRRRRRLLLLLLLLHHHHHHHHHHFFFFFFFFFFFFFFFFFFFFFFMMMMMMMMVVVVVVVGGGGFFFFFFFFFFFAAAAAPPPPPPPLLLLLLLLTTTTTTTSSSSSSRRRRRRRRRRRGGGGSSSSSSQQQQQQQQQQQQQQQQQQYYYYYYYYYYYYRRRRRRRRRRRAAAAALLLLLLLLTTTTTTTVVVVVVVPPPPPPPEEEEEEEEELLLLLLLLTTTTTTTQQQQQQQQQQQQQQQQQQMMMMMMMMWWWWWWWWWWWWWWDDDDDDDDSSSSSSKKKKKKKKKNNNNNNNNMMMMMMMMMMMMMMMMCCCCCCAAAAAAAAAADDDDDDDDPPPPPPPRRRRRRRRRRRHHHHHHHHHHGGGGRRRRRRRRRRRYYYYYYYYYYYYLLLLLLLLTTTTTTTAAAAASSSSSSAAAAAMMMMMMMMFFFFFFFFFFFRRRRRRRRRRRGGGGKKKKKKKKKMMMMMMMMSSSSSSTTTTTTTKKKKKKKKKEEEEEEEEEVVVVVVVDDDDDDDDEEEEEEEEEQQQQQQQQQMMMMMMMMIIIIIIIINNNNNNNNVVVVVVVQQQQQQQQQNNNNNNNNKKKKKKKKKNNNNNNNNSSSSSSSSSSSSYYYYYYYYYYYYFFFFFFFFFFFVVVVVVVEEEEEEEEEWWWWWWWWWWWWWWIIIIIIIIPPPPPPPNNNNNNNNNNNNNNNNVVVVVVVKKKKKKKKKSSSSSSSSSSSSVVVVVVVCCCCCCDDDDDDDDIIIIIIIIAAAAAPPPPPPPRRRRRRRRRRRGGGGLLLLLLLLSSSSSSMMMMMMMMAAAAASSSSSSTTTTTTTFFFFFFFFFFFIIIIIIIIGGGGNNNNNNNNSSSSSSTTTTTTTSSSSSSIIIIIIIIQQQQQQQQQEEEEEEEEEMMMMMMMMFFFFFFFFFFFRRRRRRRRRRRRRRRRRRRRRRVVVVVVVSSSSSSEEEEEEEEEQQQQQQQQQFFFFFFFFFFFTTTTTTTAAAAAMMMMMMMMFFFFFFFFFFFRRRRRRRRRRRRRRRRRRRRRRKKKKKKKKKAAAAAFFFFFFFFFFFLLLLLLLLHHHHHHHHHHWWWWWWWWWWWWWWYYYYYYYYYYYYTTTTTTTGGGGEEEEEEEEEGGGGMMMMMMMMDDDDDDDDEEEEEEEEEMMMMMMMMEEEEEEEEEFFFFFFFFFFFTTTTTTTEEEEEEEEEAAAAAEEEEEEEEESSSSSSNNNNNNNNMMMMMMMMNNNNNNNNDDDDDDDDLLLLLLLLVVVVVVVSSSSSSEEEEEEEEEYYYYYYYYYYYYQQQQQQQQQQQQQQQQQQYYYYYYYYYYYYQQQQQQQQQDDDDDDDDAAAAATTTTTTTAAAAADDDDDDDDEEEEEEEEEEEEEEEEEEGGGGEEEEEEEEEYYYYYYYYYYYYEEEEEEEEEDDDDDDDDEEEEEEEEEEEEEEEEEEEEEEEEEEEEEEEEEEEEEEEEEEEEEPPPPPPPEEEEEEEEEHHHHHHHHHHGGGGYYYYYYYYYYYYEEEEEEEEEE

SEQ ID NO: 170 - protein, 3483 aa, Porphyra purpurea
MMMMMMMMRRRRRRRRRRREEEEEEEEEIIIIIIIIVVVVVVVHHHHHHHHHHIIIIIIIIQQQQQQQQQAAAAAGGGGQQQQQQQQQCCCCCCGGGGNNNNNNNNQQQQQQQQQIIIIIIIIGGGGAAAAAKKKKKKKKKFFFFFFFFFFFWWWWWWWWWWWWWWQQQQQQQQQVVVVVVVIIIIIIIISSSSSSDDDDDDDDEEEEEEEEEHHHHHHHHHHGGGGVVVVVVVDDDDDDDDPPPPPPPTTTTTTTGGGGTTTTTTTYYYYYYYYYYYYKKKKKKKKKGGGGDDDDDDDDSSSSSSDDDDDDDDLLLLLLLLQQQQQQQQQLLLLLLLLEEEEEEEEERRRRRRRRRRRIIIIIIIINNNNNNNNVVVVVVVYYYYYYYYYYYYYYYYYYYYYYYYNNNNNNNNEEEEEEEEEAAAAATTTTTTTGGGGGGGGRRRRRRRRRRRYYYYYYYYYYYYVVVVVVVPPPPPPPRRRRRRRRRRRAAAAAVVVVVVVLLLLLLLLIIIIIIIIDDDDDDDDLLLLLLLLEEEEEEEEEPPPPPPPGGGGTTTTTTTMMMMMMMMDDDDDDDDAAAAAVVVVVVVRRRRRRRRRRRAAAAAGGGGPPPPPPPFFFFFFFFFFFGGGGQQQQQQQQQLLLLLLLLFFFFFFFFFFFRRRRRRRRRRRPPPPPPPDDDDDDDDNNNNNNNNFFFFFFFFFFFVVVVVVVFFFFFFFFFFFGGGGQQQQQQQQQTTTTTTTGGGGAAAAAGGGGNNNNNNNNNNNNNNNNWWWWWWWWWWWWWWAAAAAKKKKKKKKKGGGGHHHHHHHHHHYYYYYYYYYYYYTTTTTTTEEEEEEEEEGGGGAAAAAEEEEEEEEELLLLLLLLIIIIIIIIDDDDDDDDSSSSSSVVVVVVVLLLLLLLLDDDDDDDDVVVVVVVVVVVVVVRRRRRRRRRRRNNNNNNNNEEEEEEEEEAAAAAEEEEEEEEESSSSSSCCCCCCDDDDDDDDCCCCCCLLLLLLLLQQQQQQQQQGGGGFFFFFFFFFFFQQQQQQQQQMMMMMMMMTTTTTTTHHHHHHHHHHSSSSSSLLLLLLLLGGGGGGGGGGGGTTTTTTTGGGGSSSSSSGGGGMMMMMMMMGGGGTTTTTTTLLLLLLLLLLLLLLLLIIIIIIIIAAAAAKKKKKKKKKLLLLLLLLRRRRRRRRRRREEEEEEEEEEEEEEEEEEYYYYYYYYYYYYPPPPPPPDDDDDDDDRRRRRRRRRRRVVVVVVVMMMMMMMMMMMMMMMMTTTTTTTFFFFFFFFFFFSSSSSSVVVVVVVCCCCCCPPPPPPPSSSSSSPPPPPPPKKKKKKKKKVVVVVVVSSSSSSDDDDDDDDTTTTTTTVVVVVVVVVVVVVVEEEEEEEEEPPPPPPPYYYYYYYYYYYYNNNNNNNNAAAAATTTTTTTLLLLLLLLSSSSSSVVVVVVVHHHHHHHHHHQQQQQQQQQIIIIIIIIVVVVVVVEEEEEEEEENNNNNNNNTTTTTTTDDDDDDDDEEEEEEEEESSSSSSFFFFFFFFFFFVVVVVVVLLLLLLLLDDDDDDDDNNNNNNNNEEEEEEEEEAAAAALLLLLLLLYYYYYYYYYYYYDDDDDDDDIIIIIIIICCCCCCFFFFFFFFFFFRRRRRRRRRRRTTTTTTTLLLLLLLLKKKKKKKKKLLLLLLLLTTTTTTTTTTTTTTPPPPPPPTTTTTTTYYYYYYYYYYYYGGGGDDDDDDDDLLLLLLLLNNNNNNNNHHHHHHHHHHLLLLLLLLVVVVVVVCCCCCCVVVVVVVCCCCCCMMMMMMMMSSSSSSGGGGVVVVVVVTTTTTTTSSSSSSSSSSSSLLLLLLLLRRRRRRRRRRRFFFFFFFFFFFPPPPPPPGGGGQQQQQQQQQLLLLLLLLNNNNNNNNCCCCCCDDDDDDDDLLLLLLLLRRRRRRRRRRRKKKKKKKKKVVVVVVVAAAAAVVVVVVVNNNNNNNNLLLLLLLLIIIIIIIIPPPPPPPFFFFFFFFFFFPPPPPPPRRRRRRRRRRRLLLLLLLLHHHHHHHHHHFFFFFFFFFFFFFFFFFFFFFFMMMMMMMMVVVVVVVGGGGFFFFFFFFFFFAAAAAPPPPPPPLLLLLLLLTTTTTTTSSSSSSRRRRRRRRRRRGGGGSSSSSSQQQQQQQQQQQQQQQQQQYYYYYYYYYYYYRRRRRRRRRRRAAAAALLLLLLLLTTTTTTTVVVVVVVPPPPPPPEEEEEEEEELLLLLLLLTTTTTTTQQQQQQQQQQQQQQQQQQCCCCCCFFFFFFFFFFFDDDDDDDDAAAAAKKKKKKKKKNNNNNNNNMMMMMMMMMMMMMMMMCCCCCCAAAAAAAAAADDDDDDDDPPPPPPPRRRRRRRRRRRHHHHHHHHHHGGGGRRRRRRRRRRRFFFFFFFFFFFLLLLLLLLTTTTTTTAAAAASSSSSSCCCCCCMMMMMMMMFFFFFFFFFFFRRRRRRRRRRRGGGGRRRRRRRRRRRMMMMMMMMSSSSSSTTTTTTTKKKKKKKKKEEEEEEEEEVVVVVVVDDDDDDDDEEEEEEEEEQQQQQQQQQMMMMMMMMLLLLLLLLNNNNNNNNVVVVVVVQQQQQQQQQTTTTTTTKKKKKKKKKNNNNNNNNSSSSSSSSSSSSYYYYYYYYYYYYFFFFFFFFFFFVVVVVVVEEEEEEEEEWWWWWWWWWWWWWWIIIIIIIIPPPPPPPNNNNNNNNNNNNNNNNIIIIIIIIKKKKKKKKKAAAAASSSSSSVVVVVVVCCCCCCDDDDDDDDIIIIIIIIPPPPPPPPPPPPPPKKKKKKKKKGGGGLLLLLLLLKKKKKKKKKMMMMMMMMSSSSSSSSSSSSTTTTTTTFFFFFFFFFFFVVVVVVVGGGGNNNNNNNNSSSSSSTTTTTTTAAAAAIIIIIIIIQQQQQQQQQEEEEEEEEEMMMMMMMMFFFFFFFFFFFKKKKKKKKKRRRRRRRRRRRVVVVVVVGGGGEEEEEEEEEQQQQQQQQQFFFFFFFFFFFTTTTTTTAAAAAMMMMMMMMYYYYYYYYYYYYKKKKKKKKKRRRRRRRRRRRKKKKKKKKKAAAAAFFFFFFFFFFFLLLLLLLLHHHHHHHHHHWWWWWWWWWWWWWWYYYYYYYYYYYYTTTTTTTGGGGEEEEEEEEEGGGGMMMMMMMMDDDDDDDDDDDDDDDDMMMMMMMMEEEEEEEEEFFFFFFFFFFFTTTTTTTEEEEEEEEEAAAAAEEEEEEEEESSSSSSNNNNNNNNMMMMMMMMNNNNNNNNDDDDDDDDLLLLLLLLVVVVVVVSSSSSSEEEEEEEEEYYYYYYYYYYYYQQQQQQQQQQQQQQQQQQYYYYYYYYYYYYQQQQQQQQQEEEEEEEEEAAAAASSSSSSAAAAADDDDDDDDDDDDDDDDEEEEEEEEEAAAAADDDDDDDDEEEEEEEEEFFFFFFFFFFFDDDDDDDDEEEEEEEEEEEEEEEEEEEEEEEEEEEGGGGDDDDDDDDEEEEEEEEEEEEEEEEEEE

SEQ ID NO: 171 - protein, 3203 aa, Glycine max
MMMMMMMMRRRRRRRRRRREEEEEEEEEIIIIIIIILLLLLLLLHHHHHHHHHHIIIIIIIIQQQQQQQQQGGGGGGGGQQQQQQQQQCCCCCCGGGGNNNNNNNNQQQQQQQQQIIIIIIIIGGGGAAAAAKKKKKKKKKFFFFFFFFFFFWWWWWWWWWWWWWWEEEEEEEEEVVVVVVVIIIIIIIICCCCCCDDDDDDDDEEEEEEEEEHHHHHHHHHHGGGGIIIIIIIIDDDDDDDDHHHHHHHHHHTTTTTTTGGGGKKKKKKKKKYYYYYYYYYYYYSSSSSSGGGGDDDDDDDDSSSSSSEEEEEEEEELLLLLLLLQQQQQQQQQLLLLLLLLEEEEEEEEERRRRRRRRRRRIIIIIIIINNNNNNNNVVVVVVVYYYYYYYYYYYYYYYYYYYYYYYYNNNNNNNNEEEEEEEEEAAAAASSSSSSGGGGGGGGRRRRRRRRRRRYYYYYYYYYYYYVVVVVVVPPPPPPPRRRRRRRRRRRAAAAAVVVVVVVLLLLLLLLMMMMMMMMDDDDDDDDLLLLLLLLEEEEEEEEEPPPPPPPGGGGTTTTTTTMMMMMMMMDDDDDDDDSSSSSSVVVVVVVRRRRRRRRRRRSSSSSSGGGGPPPPPPPYYYYYYYYYYYYGGGGQQQQQQQQQIIIIIIIIFFFFFFFFFFFRRRRRRRRRRRPPPPPPPDDDDDDDDNNNNNNNNFFFFFFFFFFFVVVVVVVFFFFFFFFFFFGGGGQQQQQQQQQSSSSSSGGGGAAAAAGGGGNNNNNNNNNNNNNNNNWWWWWWWWWWWWWWAAAAAKKKKKKKKKGGGGHHHHHHHHHHYYYYYYYYYYYYTTTTTTTEEEEEEEEEGGGGAAAAAEEEEEEEEELLLLLLLLIIIIIIIIDDDDDDDDSSSSSSVVVVVVVLLLLLLLLDDDDDDDDVVVVVVVVVVVVVVRRRRRRRRRRRKKKKKKKKKEEEEEEEEEAAAAAEEEEEEEEENNNNNNNNCCCCCCDDDDDDDDCCCCCCLLLLLLLLQQQQQQQQQGGGGFFFFFFFFFFFQQQQQQQQQVVVVVVVCCCCCCHHHHHHHHHHSSSSSSLLLLLLLLGGGGGGGGGGGGTTTTTTTGGGGSSSSSSGGGGMMMMMMMMGGGGTTTTTTTLLLLLLLLLLLLLLLLIIIIIIIISSSSSSKKKKKKKKKIIIIIIIIRRRRRRRRRRREEEEEEEEEEEEEEEEEEYYYYYYYYYYYYPPPPPPPDDDDDDDDRRRRRRRRRRRMMMMMMMMMMMMMMMMLLLLLLLLTTTTTTTFFFFFFFFFFFSSSSSSVVVVVVVFFFFFFFFFFFPPPPPPPSSSSSSPPPPPPPKKKKKKKKKVVVVVVVSSSSSSDDDDDDDDTTTTTTTVVVVVVVVVVVVVVEEEEEEEEEPPPPPPPYYYYYYYYYYYYNNNNNNNNAAAAATTTTTTTLLLLLLLLSSSSSSVVVVVVVHHHHHHHHHHQQQQQQQQQLLLLLLLLVVVVVVVEEEEEEEEENNNNNNNNAAAAADDDDDDDDEEEEEEEEECCCCCCMMMMMMMMVVVVVVVLLLLLLLLDDDDDDDDNNNNNNNNEEEEEEEEEAAAAALLLLLLLLYYYYYYYYYYYYDDDDDDDDIIIIIIIICCCCCCFFFFFFFFFFFRRRRRRRRRRRTTTTTTTLLLLLLLLKKKKKKKKKLLLLLLLLAAAAATTTTTTTPPPPPPPTTTTTTTFFFFFFFFFFFGGGGDDDDDDDDLLLLLLLLNNNNNNNNHHHHHHHHHHLLLLLLLLIIIIIIIISSSSSSAAAAATTTTTTTMMMMMMMMSSSSSSGGGGVVVVVVVTTTTTTTCCCCCCCCCCCCLLLLLLLLRRRRRRRRRRRFFFFFFFFFFFPPPPPPPGGGGQQQQQQQQQLLLLLLLLNNNNNNNNSSSSSSDDDDDDDDLLLLLLLLRRRRRRRRRRRKKKKKKKKKLLLLLLLLAAAAAVVVVVVVNNNNNNNNLLLLLLLLIIIIIIIIPPPPPPPFFFFFFFFFFFPPPPPPPRRRRRRRRRRRLLLLLLLLHHHHHHHHHHFFFFFFFFFFFFFFFFFFFFFFMMMMMMMMVVVVVVVGGGGFFFFFFFFFFFAAAAAPPPPPPPLLLLLLLLTTTTTTTSSSSSSRRRRRRRRRRRGGGGSSSSSSQQQQQQQQQQQQQQQQQQYYYYYYYYYYYYRRRRRRRRRRRAAAAALLLLLLLLTTTTTTTVVVVVVVPPPPPPPEEEEEEEEELLLLLLLLTTTTTTTQQQQQQQQQQQQQQQQQQMMMMMMMMWWWWWWWWWWWWWWDDDDDDDDAAAAAKKKKKKKKKNNNNNNNNMMMMMMMMMMMMMMMMCCCCCCAAAAAAAAAADDDDDDDDPPPPPPPRRRRRRRRRRRHHHHHHHHHHGGGGRRRRRRRRRRRYYYYYYYYYYYYLLLLLLLLTTTTTTTAAAAASSSSSSAAAAAMMMMMMMMFFFFFFFFFFFRRRRRRRRRRRGGGGKKKKKKKKKMMMMMMMMSSSSSSTTTTTTTKKKKKKKKKEEEEEEEEEVVVVVVVDDDDDDDDEEEEEEEEEQQQQQQQQQMMMMMMMMIIIIIIIINNNNNNNNVVVVVVVQQQQQQQQQNNNNNNNNKKKKKKKKKNNNNNNNNSSSSSSSSSSSSYYYYYYYYYYYYFFFFFFFFFFFVVVVVVVEEEEEEEEEWWWWWWWWWWWWWWIIIIIIIIPPPPPPPNNNNNNNNNNNNNNNNVVVVVVVKKKKKKKKKSSSSSSSSSSSSVVVVVVVCCCCCCDDDDDDDDIIIIIIIIPPPPPPPPPPPPPPKKKKKKKKKGGGGLLLLLLLLKKKKKKKKKMMMMMMMMAAAAASSSSSSTTTTTTTFFFFFFFFFFFIIIIIIIIGGGGNNNNNNNNSSSSSSTTTTTTTSSSSSSIIIIIIIIQQQQQQQQQEEEEEEEEEMMMMMMMMFFFFFFFFFFFRRRRRRRRRRRRRRRRRRRRRRVVVVVVVSSSSSSEEEEEEEEEQQQQQQQQQFFFFFFFFFFFTTTTTTTAAAAAMMMMMMMMFFFFFFFFFFFRRRRRRRRRRRRRRRRRRRRRRKKKKKKKKKAAAAAFFFFFFFFFFFLLLLLLLLHHHHHHHHHHWWWWWWWWWWWWWWYYYYYYYYYYYYTTTTTTTGGGGEEEEEEEEEGGGGMMMMMMMMDDDDDDDDEEEEEEEEEMMMMMMMMEEEEEEEEEFFFFFFFFFFFF

SEQ ID NO: 172 - protein, 3497 aa, Triticum aestivum
MMMMMMMMRRRRRRRRRRREEEEEEEEEIIIIIIIILLLLLLLLHHHHHHHHHHIIIIIIIIQQQQQQQQQGGGGGGGGQQQQQQQQQCCCCCCGGGGNNNNNNNNQQQQQQQQQIIIIIIIIGGGGAAAAAKKKKKKKKKFFFFFFFFFFFWWWWWWWWWWWWWWEEEEEEEEEVVVVVVVIIIIIIIICCCCCCDDDDDDDDEEEEEEEEEHHHHHHHHHHGGGGIIIIIIIIDDDDDDDDQQQQQQQQQTTTTTTTGGGGKKKKKKKKKYYYYYYYYYYYYAAAAAGGGGDDDDDDDDSSSSSSDDDDDDDDLLLLLLLLQQQQQQQQQLLLLLLLLEEEEEEEEERRRRRRRRRRRIIIIIIIINNNNNNNNVVVVVVVYYYYYYYYYYYYYYYYYYYYYYYYNNNNNNNNEEEEEEEEEAAAAASSSSSSGGGGGGGGRRRRRRRRRRRFFFFFFFFFFFVVVVVVVPPPPPPPRRRRRRRRRRRAAAAAVVVVVVVLLLLLLLLMMMMMMMMDDDDDDDDLLLLLLLLEEEEEEEEEPPPPPPPGGGGTTTTTTTMMMMMMMMDDDDDDDDSSSSSSLLLLLLLLRRRRRRRRRRRSSSSSSGGGGPPPPPPPYYYYYYYYYYYYGGGGQQQQQQQQQIIIIIIIIFFFFFFFFFFFRRRRRRRRRRRPPPPPPPDDDDDDDDNNNNNNNNFFFFFFFFFFFVVVVVVVFFFFFFFFFFFGGGGQQQQQQQQQSSSSSSGGGGAAAAAGGGGNNNNNNNNNNNNNNNNWWWWWWWWWWWWWWAAAAAKKKKKKKKKGGGGHHHHHHHHHHYYYYYYYYYYYYTTTTTTTEEEEEEEEEGGGGAAAAAEEEEEEEEELLLLLLLLIIIIIIIIDDDDDDDDSSSSSSVVVVVVVLLLLLLLLDDDDDDDDVVVVVVVVVVVVVVRRRRRRRRRRRKKKKKKKKKEEEEEEEEEAAAAAEEEEEEEEENNNNNNNNCCCCCCDDDDDDDDCCCCCCLLLLLLLLQQQQQQQQQGGGGFFFFFFFFFFFQQQQQQQQQVVVVVVVCCCCCCHHHHHHHHHHSSSSSSLLLLLLLLGGGGGGGGGGGGTTTTTTTGGGGSSSSSSGGGGMMMMMMMMGGGGTTTTTTTLLLLLLLLLLLLLLLLIIIIIIIISSSSSSKKKKKKKKKIIIIIIIIRRRRRRRRRRREEEEEEEEEEEEEEEEEEYYYYYYYYYYYYPPPPPPPDDDDDDDDRRRRRRRRRRRMMMMMMMMMMMMMMMMLLLLLLLLTTTTTTTFFFFFFFFFFFSSSSSSVVVVVVVFFFFFFFFFFFPPPPPPPSSSSSSPPPPPPPKKKKKKKKKVVVVVVVSSSSSSDDDDDDDDTTTTTTTVVVVVVVVVVVVVVEEEEEEEEEPPPPPPPYYYYYYYYYYYYNNNNNNNNAAAAATTTTTTTLLLLLLLLSSSSSSVVVVVVVHHHHHHHHHHQQQQQQQQQLLLLLLLLVVVVVVVEEEEEEEEENNNNNNNNAAAAADDDDDDDDEEEEEEEEECCCCCCMMMMMMMMVVVVVVVLLLLLLLLDDDDDDDDNNNNNNNNEEEEEEEEEAAAAALLLLLLLLYYYYYYYYYYYYDDDDDDDDIIIIIIIICCCCCCFFFFFFFFFFFRRRRRRRRRRRTTTTTTTLLLLLLLLKKKKKKKKKLLLLLLLLAAAAATTTTTTTPPPPPPPTTTTTTTFFFFFFFFFFFGGGGDDDDDDDDLLLLLLLLNNNNNNNNHHHHHHHHHHLLLLLLLLIIIIIIIISSSSSSAAAAATTTTTTTMMMMMMMMSSSSSSGGGGVVVVVVVTTTTTTTCCCCCCCCCCCCLLLLLLLLRRRRRRRRRRRFFFFFFFFFFFPPPPPPPGGGGQQQQQQQQQLLLLLLLLNNNNNNNNSSSSSSDDDDDDDDLLLLLLLLRRRRRRRRRRRKKKKKKKKKLLLLLLLLAAAAAVVVVVVVNNNNNNNNLLLLLLLLIIIIIIIIPPPPPPPFFFFFFFFFFFPPPPPPPRRRRRRRRRRRLLLLLLLLHHHHHHHHHHFFFFFFFFFFFFFFFFFFFFFFMMMMMMMMVVVVVVVGGGGFFFFFFFFFFFAAAAAPPPPPPPLLLLLLLLTTTTTTTSSSSSSRRRRRRRRRRRGGGGSSSSSSQQQQQQQQQQQQQQQQQQYYYYYYYYYYYYRRRRRRRRRRRAAAAALLLLLLLLTTTTTTTVVVVVVVPPPPPPPEEEEEEEEELLLLLLLLTTTTTTTQQQQQQQQQQQQQQQQQQMMMMMMMMWWWWWWWWWWWWWWDDDDDDDDSSSSSSKKKKKKKKKNNNNNNNNMMMMMMMMMMMMMMMMCCCCCCAAAAAAAAAADDDDDDDDPPPPPPPRRRRRRRRRRRHHHHHHHHHHGGGGRRRRRRRRRRRYYYYYYYYYYYYLLLLLLLLTTTTTTTAAAAASSSSSSAAAAAMMMMMMMMFFFFFFFFFFFRRRRRRRRRRRGGGGKKKKKKKKKMMMMMMMMSSSSSSTTTTTTTKKKKKKKKKEEEEEEEEEVVVVVVVDDDDDDDDEEEEEEEEEQQQQQQQQQMMMMMMMMLLLLLLLLNNNNNNNNVVVVVVVQQQQQQQQQNNNNNNNNKKKKKKKKKNNNNNNNNSSSSSSSSSSSSYYYYYYYYYYYYFFFFFFFFFFFVVVVVVVEEEEEEEEEWWWWWWWWWWWWWWIIIIIIIIPPPPPPPNNNNNNNNNNNNNNNNVVVVVVVKKKKKKKKKSSSSSSSSSSSSVVVVVVVCCCCCCDDDDDDDDIIIIIIIIPPPPPPPPPPPPPPTTTTTTTGGGGLLLLLLLLSSSSSSMMMMMMMMSSSSSSSSSSSSTTTTTTTFFFFFFFFFFFVVVVVVVGGGGNNNNNNNNSSSSSSTTTTTTTSSSSSSIIIIIIIIQQQQQQQQQEEEEEEEEEMMMMMMMMFFFFFFFFFFFRRRRRRRRRRRRRRRRRRRRRRVVVVVVVSSSSSSEEEEEEEEEQQQQQQQQQFFFFFFFFFFFTTTTTTTAAAAAMMMMMMMMFFFFFFFFFFFRRRRRRRRRRRRRRRRRRRRRRKKKKKKKKKAAAAAFFFFFFFFFFFLLLLLLLLHHHHHHHHHHWWWWWWWWWWWWWWYYYYYYYYYYYYTTTTTTTGGGGEEEEEEEEEGGGGMMMMMMMMDDDDDDDDEEEEEEEEEMMMMMMMMEEEEEEEEEFFFFFFFFFFFTTTTTTTEEEEEEEEEAAAAAEEEEEEEEESSSSSSNNNNNNNNMMMMMMMMNNNNNNNNDDDDDDDDLLLLLLLLVVVVVVVAAAAAEEEEEEEEEYYYYYYYYYYYYQQQQQQQQQQQQQQQQQQYYYYYYYYYYYYQQQQQQQQQDDDDDDDDAAAAATTTTTTTAAAAADDDDDDDDEEEEEEEEEEEEEEEEEEEEEEEEEEEEEEEEEEEEYYYYYYYYYYYYDDDDDDDDEEEEEEEEEEEEEEEEEEEEEEEEEEEEEEEEEEEEEEEEEEEEEEEEEEEEEEAAAAAAAAAAA

SEQ ID NO: 173 - protein, 3496 aa, Arabidopsis thaliana
MMMMMMMMRRRRRRRRRRREEEEEEEEEIIIIIIIILLLLLLLLHHHHHHHHHHIIIIIIIIQQQQQQQQQGGGGGGGGQQQQQQQQQCCCCCCGGGGNNNNNNNNQQQQQQQQQIIIIIIIIGGGGAAAAAKKKKKKKKKFFFFFFFFFFFWWWWWWWWWWWWWWEEEEEEEEEVVVVVVVIIIIIIIICCCCCCDDDDDDDDEEEEEEEEEHHHHHHHHHHGGGGIIIIIIIIDDDDDDDDHHHHHHHHHHTTTTTTTGGGGQQQQQQQQQYYYYYYYYYYYYVVVVVVVGGGGDDDDDDDDSSSSSSPPPPPPPLLLLLLLLQQQQQQQQQLLLLLLLLEEEEEEEEERRRRRRRRRRRIIIIIIIIDDDDDDDDVVVVVVVYYYYYYYYYYYYFFFFFFFFFFFNNNNNNNNEEEEEEEEEAAAAASSSSSSGGGGGGGGKKKKKKKKKYYYYYYYYYYYYVVVVVVVPPPPPPPRRRRRRRRRRRAAAAAVVVVVVVLLLLLLLLMMMMMMMMDDDDDDDDLLLLLLLLEEEEEEEEEPPPPPPPGGGGTTTTTTTMMMMMMMMDDDDDDDDSSSSSSLLLLLLLLRRRRRRRRRRRSSSSSSGGGGPPPPPPPFFFFFFFFFFFGGGGQQQQQQQQQIIIIIIIIFFFFFFFFFFFRRRRRRRRRRRPPPPPPPDDDDDDDDNNNNNNNNFFFFFFFFFFFVVVVVVVFFFFFFFFFFFGGGGQQQQQQQQQSSSSSSGGGGAAAAAGGGGNNNNNNNNNNNNNNNNWWWWWWWWWWWWWWAAAAAKKKKKKKKKGGGGHHHHHHHHHHYYYYYYYYYYYYTTTTTTTEEEEEEEEEGGGGAAAAAEEEEEEEEELLLLLLLLIIIIIIIIDDDDDDDDSSSSSSVVVVVVVLLLLLLLLDDDDDDDDVVVVVVVVVVVVVVRRRRRRRRRRRKKKKKKKKKEEEEEEEEEAAAAAEEEEEEEEENNNNNNNNSSSSSSDDDDDDDDCCCCCCLLLLLLLLQQQQQQQQQGGGGFFFFFFFFFFFQQQQQQQQQVVVVVVVCCCCCCHHHHHHHHHHSSSSSSLLLLLLLLGGGGGGGGGGGGTTTTTTTGGGGSSSSSSGGGGMMMMMMMMGGGGTTTTTTTLLLLLLLLLLLLLLLLIIIIIIIISSSSSSKKKKKKKKKIIIIIIIIRRRRRRRRRRREEEEEEEEEEEEEEEEEEYYYYYYYYYYYYPPPPPPPDDDDDDDDRRRRRRRRRRRMMMMMMMMMMMMMMMMMMMMMMMMTTTTTTTFFFFFFFFFFFSSSSSSVVVVVVVFFFFFFFFFFFPPPPPPPSSSSSSPPPPPPPKKKKKKKKKVVVVVVVSSSSSSDDDDDDDDTTTTTTTVVVVVVVVVVVVVVEEEEEEEEEPPPPPPPYYYYYYYYYYYYNNNNNNNNAAAAATTTTTTTLLLLLLLLSSSSSSVVVVVVVHHHHHHHHHHQQQQQQQQQLLLLLLLLVVVVVVVEEEEEEEEENNNNNNNNAAAAADDDDDDDDEEEEEEEEECCCCCCMMMMMMMMVVVVVVVLLLLLLLLDDDDDDDDNNNNNNNNEEEEEEEEEAAAAALLLLLLLLYYYYYYYYYYYYDDDDDDDDIIIIIIIICCCCCCFFFFFFFFFFFRRRRRRRRRRRTTTTTTTLLLLLLLLKKKKKKKKKLLLLLLLLAAAAANNNNNNNNPPPPPPPTTTTTTTFFFFFFFFFFFGGGGDDDDDDDDLLLLLLLLNNNNNNNNHHHHHHHHHHLLLLLLLLIIIIIIIISSSSSSAAAAATTTTTTTMMMMMMMMSSSSSSGGGGVVVVVVVTTTTTTTCCCCCCCCCCCCLLLLLLLLRRRRRRRRRRRFFFFFFFFFFFPPPPPPPGGGGQQQQQQQQQLLLLLLLLNNNNNNNNSSSSSSDDDDDDDDLLLLLLLLRRRRRRRRRRRKKKKKKKKKLLLLLLLLAAAAAVVVVVVVNNNNNNNNLLLLLLLLIIIIIIIIPPPPPPPFFFFFFFFFFFPPPPPPPRRRRRRRRRRRLLLLLLLLHHHHHHHHHHFFFFFFFFFFFFFFFFFFFFFFMMMMMMMMVVVVVVVGGGGFFFFFFFFFFFAAAAAPPPPPPPLLLLLLLLTTTTTTTSSSSSSRRRRRRRRRRRGGGGSSSSSSQQQQQQQQQQQQQQQQQQYYYYYYYYYYYYSSSSSSAAAAALLLLLLLLSSSSSSVVVVVVVPPPPPPPEEEEEEEEELLLLLLLLTTTTTTTQQQQQQQQQQQQQQQQQQMMMMMMMMWWWWWWWWWWWWWWDDDDDDDDAAAAAKKKKKKKKKNNNNNNNNMMMMMMMMMMMMMMMMCCCCCCAAAAAAAAAADDDDDDDDPPPPPPPRRRRRRRRRRRHHHHHHHHHHGGGGRRRRRRRRRRRYYYYYYYYYYYYLLLLLLLLTTTTTTTRRRRRRRRRRRSSSSSSAAAAAVVVVVVVFFFFFFFFFFFRRRRRRRRRRRGGGGKKKKKKKKKLLLLLLLLSSSSSSTTTTTTTKKKKKKKKKEEEEEEEEEVVVVVVVDDDDDDDDEEEEEEEEEQQQQQQQQQMMMMMMMMMMMMMMMMNNNNNNNNIIIIIIIIQQQQQQQQQNNNNNNNNKKKKKKKKKNNNNNNNNSSSSSSSSSSSSYYYYYYYYYYYYFFFFFFFFFFFVVVVVVVEEEEEEEEEWWWWWWWWWWWWWWIIIIIIIIPPPPPPPNNNNNNNNNNNNNNNNVVVVVVVKKKKKKKKKSSSSSSSSSSSSVVVVVVVCCCCCCDDDDDDDDIIIIIIIIAAAAAPPPPPPPKKKKKKKKKGGGGLLLLLLLLKKKKKKKKKMMMMMMMMAAAAASSSSSSTTTTTTTFFFFFFFFFFFIIIIIIIIGGGGNNNNNNNNSSSSSSTTTTTTTSSSSSSIIIIIIIIQQQQQQQQQEEEEEEEEEMMMMMMMMFFFFFFFFFFFRRRRRRRRRRRRRRRRRRRRRRVVVVVVVSSSSSSEEEEEEEEEQQQQQQQQQFFFFFFFFFFFTTTTTTTAAAAAMMMMMMMMFFFFFFFFFFFRRRRRRRRRRRRRRRRRRRRRRKKKKKKKKKAAAAAFFFFFFFFFFFLLLLLLLLHHHHHHHHHHWWWWWWWWWWWWWWYYYYYYYYYYYYTTTTTTTGGGGEEEEEEEEEGGGGMMMMMMMMDDDDDDDDEEEEEEEEEMMMMMMMMEEEEEEEEEFFFFFFFFFFFTTTTTTTEEEEEEEEEAAAAAEEEEEEEEESSSSSSNNNNNNNNMMMMMMMMNNNNNNNNDDDDDDDDLLLLLLLLVVVVVVVAAAAAEEEEEEEEEYYYYYYYYYYYYQQQQQQQQQQQQQQQQQQYYYYYYYYYYYYQQQQQQQQQDDDDDDDDAAAAATTTTTTTAAAAAGGGGEEEEEEEEEEEEEEEEEEEEEEEEEEEYYYYYYYYYYYYEEEEEEEEEEEEEEEEEEEEEEEEEEEEEEEEEEEEEEEEEEEEEEEEEEEEEEYYYYYYYYYYYYEEEEEEEEETTTTTTTT

SEQ ID NO: 174 - protein, 3488 aa, Caenorhabditis elegans
MMMMMMMMRRRRRRRRRRREEEEEEEEEIIIIIIIIVVVVVVVHHHHHHHHHHIIIIIIIIQQQQQQQQQAAAAAGGGGQQQQQQQQQCCCCCCGGGGNNNNNNNNQQQQQQQQQIIIIIIIIGGGGAAAAAKKKKKKKKKFFFFFFFFFFFWWWWWWWWWWWWWWEEEEEEEEEVVVVVVVIIIIIIIISSSSSSDDDDDDDDEEEEEEEEEHHHHHHHHHHGGGGIIIIIIIIDDDDDDDDPPPPPPPTTTTTTTGGGGAAAAAYYYYYYYYYYYYNNNNNNNNGGGGDDDDDDDDSSSSSSDDDDDDDDLLLLLLLLQQQQQQQQQLLLLLLLLEEEEEEEEERRRRRRRRRRRIIIIIIIINNNNNNNNVVVVVVVYYYYYYYYYYYYYYYYYYYYYYYYNNNNNNNNEEEEEEEEEAAAAASSSSSSGGGGGGGGKKKKKKKKKYYYYYYYYYYYYVVVVVVVPPPPPPPRRRRRRRRRRRAAAAACCCCCCLLLLLLLLVVVVVVVDDDDDDDDLLLLLLLLEEEEEEEEEPPPPPPPGGGGTTTTTTTMMMMMMMMDDDDDDDDSSSSSSVVVVVVVRRRRRRRRRRRAAAAAGGGGPPPPPPPFFFFFFFFFFFGGGGQQQQQQQQQLLLLLLLLFFFFFFFFFFFRRRRRRRRRRRPPPPPPPDDDDDDDDNNNNNNNNFFFFFFFFFFFVVVVVVVFFFFFFFFFFFGGGGQQQQQQQQQSSSSSSGGGGAAAAAGGGGNNNNNNNNNNNNNNNNWWWWWWWWWWWWWWAAAAAKKKKKKKKKGGGGHHHHHHHHHHYYYYYYYYYYYYTTTTTTTEEEEEEEEEGGGGAAAAAEEEEEEEEELLLLLLLLVVVVVVVDDDDDDDDNNNNNNNNVVVVVVVLLLLLLLLDDDDDDDDVVVVVVVVVVVVVVRRRRRRRRRRRKKKKKKKKKEEEEEEEEEAAAAAEEEEEEEEESSSSSSCCCCCCDDDDDDDDCCCCCCLLLLLLLLQQQQQQQQQGGGGFFFFFFFFFFFQQQQQQQQQMMMMMMMMTTTTTTTHHHHHHHHHHSSSSSSLLLLLLLLGGGGGGGGGGGGTTTTTTTGGGGSSSSSSGGGGMMMMMMMMGGGGTTTTTTTLLLLLLLLLLLLLLLLIIIIIIIISSSSSSKKKKKKKKKIIIIIIIIRRRRRRRRRRREEEEEEEEEEEEEEEEEEYYYYYYYYYYYYPPPPPPPDDDDDDDDRRRRRRRRRRRIIIIIIIIMMMMMMMMMMMMMMMMTTTTTTTFFFFFFFFFFFSSSSSSVVVVVVVVVVVVVVPPPPPPPSSSSSSPPPPPPPKKKKKKKKKVVVVVVVSSSSSSDDDDDDDDTTTTTTTVVVVVVVVVVVVVVEEEEEEEEEPPPPPPPYYYYYYYYYYYYNNNNNNNNAAAAATTTTTTTLLLLLLLLSSSSSSVVVVVVVHHHHHHHHHHQQQQQQQQQLLLLLLLLVVVVVVVEEEEEEEEENNNNNNNNTTTTTTTDDDDDDDDEEEEEEEEETTTTTTTFFFFFFFFFFFCCCCCCIIIIIIIIDDDDDDDDNNNNNNNNEEEEEEEEEAAAAALLLLLLLLYYYYYYYYYYYYDDDDDDDDIIIIIIIICCCCCCFFFFFFFFFFFRRRRRRRRRRRTTTTTTTLLLLLLLLKKKKKKKKKLLLLLLLLTTTTTTTTTTTTTTPPPPPPPTTTTTTTYYYYYYYYYYYYGGGGDDDDDDDDLLLLLLLLNNNNNNNNHHHHHHHHHHLLLLLLLLVVVVVVVSSSSSSMMMMMMMMTTTTTTTMMMMMMMMSSSSSSGGGGVVVVVVVTTTTTTTTTTTTTTCCCCCCLLLLLLLLRRRRRRRRRRRFFFFFFFFFFFPPPPPPPGGGGQQQQQQQQQLLLLLLLLNNNNNNNNAAAAADDDDDDDDLLLLLLLLRRRRRRRRRRRKKKKKKKKKLLLLLLLLAAAAAVVVVVVVNNNNNNNNMMMMMMMMVVVVVVVPPPPPPPFFFFFFFFFFFPPPPPPPRRRRRRRRRRRLLLLLLLLHHHHHHHHHHFFFFFFFFFFFFFFFFFFFFFFMMMMMMMMPPPPPPPGGGGFFFFFFFFFFFAAAAAPPPPPPPLLLLLLLLTTTTTTTSSSSSSRRRRRRRRRRRGGGGSSSSSSQQQQQQQQQQQQQQQQQQYYYYYYYYYYYYRRRRRRRRRRRSSSSSSLLLLLLLLTTTTTTTVVVVVVVPPPPPPPEEEEEEEEELLLLLLLLTTTTTTTQQQQQQQQQQQQQQQQQQMMMMMMMMFFFFFFFFFFFDDDDDDDDAAAAAKKKKKKKKKNNNNNNNNMMMMMMMMMMMMMMMMAAAAAAAAAACCCCCCDDDDDDDDPPPPPPPRRRRRRRRRRRHHHHHHHHHHGGGGRRRRRRRRRRRYYYYYYYYYYYYLLLLLLLLTTTTTTTVVVVVVVAAAAAAAAAAMMMMMMMMFFFFFFFFFFFRRRRRRRRRRRGGGGRRRRRRRRRRRMMMMMMMMSSSSSSMMMMMMMMKKKKKKKKKEEEEEEEEEVVVVVVVDDDDDDDDEEEEEEEEEQQQQQQQQQMMMMMMMMLLLLLLLLNNNNNNNNVVVVVVVQQQQQQQQQNNNNNNNNKKKKKKKKKNNNNNNNNSSSSSSSSSSSSYYYYYYYYYYYYFFFFFFFFFFFVVVVVVVEEEEEEEEEWWWWWWWWWWWWWWIIIIIIIIPPPPPPPNNNNNNNNNNNNNNNNVVVVVVVKKKKKKKKKTTTTTTTAAAAAVVVVVVVCCCCCCDDDDDDDDIIIIIIIIPPPPPPPPPPPPPPRRRRRRRRRRRGGGGVVVVVVVKKKKKKKKKMMMMMMMMAAAAAAAAAATTTTTTTFFFFFFFFFFFVVVVVVVGGGGNNNNNNNNSSSSSSTTTTTTTAAAAAIIIIIIIIQQQQQQQQQEEEEEEEEELLLLLLLLFFFFFFFFFFFKKKKKKKKKRRRRRRRRRRRIIIIIIIISSSSSSEEEEEEEEEQQQQQQQQQFFFFFFFFFFFTTTTTTTAAAAAMMMMMMMMFFFFFFFFFFFRRRRRRRRRRRRRRRRRRRRRRKKKKKKKKKAAAAAFFFFFFFFFFFLLLLLLLLHHHHHHHHHHWWWWWWWWWWWWWWYYYYYYYYYYYYTTTTTTTGGGGEEEEEEEEEGGGGMMMMMMMMDDDDDDDDEEEEEEEEEMMMMMMMMEEEEEEEEEFFFFFFFFFFFTTTTTTTEEEEEEEEEAAAAAEEEEEEEEESSSSSSNNNNNNNNMMMMMMMMNNNNNNNNDDDDDDDDLLLLLLLLVVVVVVVSSSSSSEEEEEEEEEYYYYYYYYYYYYQQQQQQQQQQQQQQQQQQYYYYYYYYYYYYQQQQQQQQQEEEEEEEEEAAAAATTTTTTTAAAAADDDDDDDDDDDDDDDDEEEEEEEEEGGGGEEEEEEEEEFFFFFFFFFFFDDDDDDDDEEEEEEEEEHHHHHHHHHHDDDDDDDDQQQQQQQQQDDDDDDDDVVVVVVVEEEEEEEEEE

SEQ ID NO: 175 - protein, 3536 aa, Gallus gallus
MMMMMMMMRRRRRRRRRRREEEEEEEEEIIIIIIIIVVVVVVVHHHHHHHHHHIIIIIIIIQQQQQQQQQAAAAAGGGGQQQQQQQQQCCCCCCGGGGNNNNNNNNQQQQQQQQQIIIIIIIIGGGGAAAAAKKKKKKKKKFFFFFFFFFFFWWWWWWWWWWWWWWEEEEEEEEEVVVVVVVIIIIIIIISSSSSSDDDDDDDDEEEEEEEEEHHHHHHHHHHGGGGIIIIIIIIDDDDDDDDPPPPPPPSSSSSSGGGGNNNNNNNNYYYYYYYYYYYYVVVVVVVGGGGDDDDDDDDSSSSSSDDDDDDDDLLLLLLLLQQQQQQQQQLLLLLLLLEEEEEEEEERRRRRRRRRRRIIIIIIIISSSSSSVVVVVVVYYYYYYYYYYYYYYYYYYYYYYYYNNNNNNNNEEEEEEEEEAAAAASSSSSSSSSSSSHHHHHHHHHHKKKKKKKKKYYYYYYYYYYYYVVVVVVVPPPPPPPRRRRRRRRRRRAAAAAIIIIIIIILLLLLLLLVVVVVVVDDDDDDDDLLLLLLLLEEEEEEEEEPPPPPPPGGGGTTTTTTTMMMMMMMMDDDDDDDDSSSSSSVVVVVVVRRRRRRRRRRRSSSSSSGGGGAAAAAFFFFFFFFFFFGGGGHHHHHHHHHHLLLLLLLLFFFFFFFFFFFRRRRRRRRRRRPPPPPPPDDDDDDDDNNNNNNNNFFFFFFFFFFFIIIIIIIIFFFFFFFFFFFGGGGQQQQQQQQQSSSSSSGGGGAAAAAGGGGNNNNNNNNNNNNNNNNWWWWWWWWWWWWWWAAAAAKKKKKKKKKGGGGHHHHHHHHHHYYYYYYYYYYYYTTTTTTTEEEEEEEEEGGGGAAAAAEEEEEEEEELLLLLLLLVVVVVVVDDDDDDDDSSSSSSVVVVVVVLLLLLLLLDDDDDDDDVVVVVVVVVVVVVVRRRRRRRRRRRKKKKKKKKKEEEEEEEEECCCCCCEEEEEEEEENNNNNNNNCCCCCCDDDDDDDDCCCCCCLLLLLLLLQQQQQQQQQGGGGFFFFFFFFFFFQQQQQQQQQLLLLLLLLTTTTTTTHHHHHHHHHHSSSSSSLLLLLLLLGGGGGGGGGGGGTTTTTTTGGGGSSSSSSGGGGMMMMMMMMGGGGTTTTTTTLLLLLLLLLLLLLLLLIIIIIIIISSSSSSKKKKKKKKKVVVVVVVRRRRRRRRRRREEEEEEEEEEEEEEEEEEYYYYYYYYYYYYPPPPPPPDDDDDDDDRRRRRRRRRRRIIIIIIIIMMMMMMMMNNNNNNNNTTTTTTTFFFFFFFFFFFSSSSSSVVVVVVVVVVVVVVPPPPPPPSSSSSSPPPPPPPKKKKKKKKKVVVVVVVSSSSSSDDDDDDDDTTTTTTTVVVVVVVVVVVVVVEEEEEEEEEPPPPPPPYYYYYYYYYYYYNNNNNNNNAAAAATTTTTTTLLLLLLLLSSSSSSIIIIIIIIHHHHHHHHHHQQQQQQQQQLLLLLLLLVVVVVVVEEEEEEEEENNNNNNNNTTTTTTTDDDDDDDDEEEEEEEEETTTTTTTYYYYYYYYYYYYCCCCCCIIIIIIIIDDDDDDDDNNNNNNNNEEEEEEEEEAAAAALLLLLLLLYYYYYYYYYYYYDDDDDDDDIIIIIIIICCCCCCFFFFFFFFFFFRRRRRRRRRRRTTTTTTTLLLLLLLLKKKKKKKKKLLLLLLLLAAAAATTTTTTTPPPPPPPTTTTTTTYYYYYYYYYYYYGGGGDDDDDDDDLLLLLLLLNNNNNNNNHHHHHHHHHHLLLLLLLLVVVVVVVSSSSSSAAAAATTTTTTTMMMMMMMMSSSSSSGGGGVVVVVVVTTTTTTTTTTTTTTSSSSSSLLLLLLLLRRRRRRRRRRRFFFFFFFFFFFPPPPPPPGGGGQQQQQQQQQLLLLLLLLNNNNNNNNAAAAADDDDDDDDLLLLLLLLRRRRRRRRRRRKKKKKKKKKLLLLLLLLAAAAAVVVVVVVNNNNNNNNMMMMMMMMVVVVVVVPPPPPPPFFFFFFFFFFFPPPPPPPRRRRRRRRRRRLLLLLLLLHHHHHHHHHHFFFFFFFFFFFFFFFFFFFFFFMMMMMMMMPPPPPPPGGGGFFFFFFFFFFFAAAAAPPPPPPPLLLLLLLLTTTTTTTRRRRRRRRRRRRRRRRRRRRRRGGGGSSSSSSQQQQQQQQQQQQQQQQQQYYYYYYYYYYYYRRRRRRRRRRRAAAAALLLLLLLLTTTTTTTVVVVVVVPPPPPPPEEEEEEEEELLLLLLLLTTTTTTTQQQQQQQQQQQQQQQQQQMMMMMMMMFFFFFFFFFFFDDDDDDDDAAAAAKKKKKKKKKNNNNNNNNMMMMMMMMMMMMMMMMAAAAAAAAAACCCCCCDDDDDDDDPPPPPPPRRRRRRRRRRRHHHHHHHHHHGGGGRRRRRRRRRRRYYYYYYYYYYYYLLLLLLLLTTTTTTTVVVVVVVAAAAATTTTTTTVVVVVVVFFFFFFFFFFFRRRRRRRRRRRGGGGRRRRRRRRRRRMMMMMMMMSSSSSSMMMMMMMMKKKKKKKKKEEEEEEEEEVVVVVVVDDDDDDDDEEEEEEEEEQQQQQQQQQMMMMMMMMLLLLLLLLAAAAAIIIIIIIIQQQQQQQQQSSSSSSKKKKKKKKKNNNNNNNNSSSSSSSSSSSSYYYYYYYYYYYYFFFFFFFFFFFVVVVVVVEEEEEEEEEWWWWWWWWWWWWWWIIIIIIIIPPPPPPPNNNNNNNNNNNNNNNNVVVVVVVKKKKKKKKKVVVVVVVAAAAAVVVVVVVCCCCCCDDDDDDDDIIIIIIIIPPPPPPPPPPPPPPRRRRRRRRRRRGGGGLLLLLLLLKKKKKKKKKMMMMMMMMSSSSSSSSSSSSTTTTTTTFFFFFFFFFFFIIIIIIIIGGGGNNNNNNNNSSSSSSTTTTTTTAAAAAIIIIIIIIQQQQQQQQQEEEEEEEEELLLLLLLLFFFFFFFFFFFKKKKKKKKKRRRRRRRRRRRIIIIIIIISSSSSSEEEEEEEEEQQQQQQQQQFFFFFFFFFFFTTTTTTTAAAAAMMMMMMMMFFFFFFFFFFFRRRRRRRRRRRRRRRRRRRRRRKKKKKKKKKAAAAAFFFFFFFFFFFLLLLLLLLHHHHHHHHHHWWWWWWWWWWWWWWYYYYYYYYYYYYTTTTTTTGGGGEEEEEEEEEGGGGMMMMMMMMDDDDDDDDEEEEEEEEEMMMMMMMMEEEEEEEEEFFFFFFFFFFFTTTTTTTEEEEEEEEEAAAAAEEEEEEEEESSSSSSNNNNNNNNMMMMMMMMNNNNNNNNDDDDDDDDLLLLLLLLVVVVVVVSSSSSSEEEEEEEEEYYYYYYYYYYYYQQQQQQQQQQQQQQQQQQYYYYYYYYYYYYQQQQQQQQQDDDDDDDDAAAAATTTTTTTAAAAAEEEEEEEEEEEEEEEEEEEEEEEEEEEGGGGEEEEEEEEEMMMMMMMMYYYYYYYYYYYYEEEEEEEEEDDDDDDDDDDDDDDDDEEEEEEEEEEEEEEEEEEEEEEEEEEESSSSSSEEEEEEEEEQQQQQQQQQGGGGAAAAAKKKKKKKKKK

SEQ ID NO: 176 - protein, 3509 aa, Eleusine indica
MMMMMMMMRRRRRRRRRRREEEEEEEEEIIIIIIIILLLLLLLLHHHHHHHHHHIIIIIIIIQQQQQQQQQGGGGGGGGQQQQQQQQQCCCCCCGGGGNNNNNNNNQQQQQQQQQIIIIIIIIGGGGSSSSSSKKKKKKKKKFFFFFFFFFFFWWWWWWWWWWWWWWEEEEEEEEEVVVVVVVVVVVVVVCCCCCCDDDDDDDDEEEEEEEEEHHHHHHHHHHGGGGIIIIIIIIDDDDDDDDPPPPPPPTTTTTTTGGGGRRRRRRRRRRRYYYYYYYYYYYYVVVVVVVGGGGTTTTTTTSSSSSSDDDDDDDDLLLLLLLLQQQQQQQQQLLLLLLLLEEEEEEEEERRRRRRRRRRRVVVVVVVNNNNNNNNVVVVVVVYYYYYYYYYYYYYYYYYYYYYYYYNNNNNNNNEEEEEEEEEAAAAASSSSSSCCCCCCGGGGRRRRRRRRRRRFFFFFFFFFFFVVVVVVVPPPPPPPRRRRRRRRRRRAAAAAVVVVVVVLLLLLLLLMMMMMMMMDDDDDDDDLLLLLLLLEEEEEEEEEPPPPPPPGGGGTTTTTTTMMMMMMMMDDDDDDDDSSSSSSVVVVVVVRRRRRRRRRRRTTTTTTTGGGGPPPPPPPYYYYYYYYYYYYGGGGQQQQQQQQQIIIIIIIIFFFFFFFFFFFRRRRRRRRRRRPPPPPPPDDDDDDDDNNNNNNNNFFFFFFFFFFFVVVVVVVFFFFFFFFFFFGGGGQQQQQQQQQSSSSSSGGGGAAAAAGGGGNNNNNNNNNNNNNNNNWWWWWWWWWWWWWWAAAAAKKKKKKKKKGGGGHHHHHHHHHHYYYYYYYYYYYYTTTTTTTEEEEEEEEEGGGGAAAAAEEEEEEEEELLLLLLLLIIIIIIIIDDDDDDDDSSSSSSVVVVVVVLLLLLLLLDDDDDDDDVVVVVVVVVVVVVVRRRRRRRRRRRKKKKKKKKKEEEEEEEEEAAAAAEEEEEEEEENNNNNNNNCCCCCCDDDDDDDDCCCCCCLLLLLLLLQQQQQQQQQGGGGFFFFFFFFFFFQQQQQQQQQVVVVVVVCCCCCCHHHHHHHHHHSSSSSSLLLLLLLLGGGGGGGGGGGGTTTTTTTGGGGSSSSSSGGGGMMMMMMMMGGGGTTTTTTTLLLLLLLLLLLLLLLLIIIIIIIISSSSSSKKKKKKKKKIIIIIIIIRRRRRRRRRRREEEEEEEEEEEEEEEEEEYYYYYYYYYYYYPPPPPPPDDDDDDDDRRRRRRRRRRRMMMMMMMMMMMMMMMMLLLLLLLLTTTTTTTFFFFFFFFFFFSSSSSSVVVVVVVFFFFFFFFFFFPPPPPPPSSSSSSPPPPPPPKKKKKKKKKVVVVVVVSSSSSSDDDDDDDDTTTTTTTVVVVVVVVVVVVVVEEEEEEEEEPPPPPPPYYYYYYYYYYYYNNNNNNNNAAAAATTTTTTTLLLLLLLLSSSSSSVVVVVVVHHHHHHHHHHQQQQQQQQQLLLLLLLLVVVVVVVEEEEEEEEENNNNNNNNAAAAADDDDDDDDEEEEEEEEECCCCCCMMMMMMMMVVVVVVVLLLLLLLLDDDDDDDDNNNNNNNNEEEEEEEEEAAAAALLLLLLLLYYYYYYYYYYYYDDDDDDDDIIIIIIIICCCCCCFFFFFFFFFFFRRRRRRRRRRRTTTTTTTLLLLLLLLKKKKKKKKKLLLLLLLLTTTTTTTTTTTTTTPPPPPPPSSSSSSFFFFFFFFFFFGGGGDDDDDDDDLLLLLLLLNNNNNNNNHHHHHHHHHHLLLLLLLLIIIIIIIISSSSSSAAAAATTTTTTTMMMMMMMMSSSSSSGGGGVVVVVVVTTTTTTTCCCCCCCCCCCCLLLLLLLLRRRRRRRRRRRFFFFFFFFFFFPPPPPPPGGGGQQQQQQQQQLLLLLLLLNNNNNNNNSSSSSSDDDDDDDDLLLLLLLLRRRRRRRRRRRKKKKKKKKKLLLLLLLLAAAAAVVVVVVVNNNNNNNNLLLLLLLLIIIIIIIIPPPPPPPFFFFFFFFFFFPPPPPPPRRRRRRRRRRRLLLLLLLLHHHHHHHHHHFFFFFFFFFFFFFFFFFFFFFFMMMMMMMMVVVVVVVGGGGFFFFFFFFFFFAAAAAPPPPPPPLLLLLLLLTTTTTTTSSSSSSRRRRRRRRRRRGGGGSSSSSSQQQQQQQQQQQQQQQQQQYYYYYYYYYYYYRRRRRRRRRRRAAAAALLLLLLLLTTTTTTTVVVVVVVPPPPPPPEEEEEEEEELLLLLLLLTTTTTTTQQQQQQQQQQQQQQQQQQMMMMMMMMWWWWWWWWWWWWWWDDDDDDDDAAAAAKKKKKKKKKNNNNNNNNMMMMMMMMMMMMMMMMCCCCCCAAAAAAAAAADDDDDDDDPPPPPPPRRRRRRRRRRRHHHHHHHHHHGGGGRRRRRRRRRRRYYYYYYYYYYYYLLLLLLLLTTTTTTTAAAAASSSSSSAAAAAMMMMMMMMFFFFFFFFFFFRRRRRRRRRRRGGGGKKKKKKKKKMMMMMMMMSSSSSSTTTTTTTKKKKKKKKKEEEEEEEEEVVVVVVVDDDDDDDDEEEEEEEEEQQQQQQQQQMMMMMMMMIIIIIIIINNNNNNNNVVVVVVVQQQQQQQQQNNNNNNNNKKKKKKKKKNNNNNNNNSSSSSSSSSSSSYYYYYYYYYYYYFFFFFFFFFFFVVVVVVVEEEEEEEEEWWWWWWWWWWWWWWIIIIIIIIPPPPPPPNNNNNNNNNNNNNNNNVVVVVVVKKKKKKKKKSSSSSSSSSSSSVVVVVVVCCCCCCDDDDDDDDIIIIIIIIPPPPPPPPPPPPPPRRRRRRRRRRRGGGGLLLLLLLLSSSSSSMMMMMMMMAAAAASSSSSSTTTTTTTFFFFFFFFFFFIIIIIIIIGGGGNNNNNNNNSSSSSSTTTTTTTSSSSSSIIIIIIIIQQQQQQQQQEEEEEEEEEMMMMMMMMFFFFFFFFFFFRRRRRRRRRRRRRRRRRRRRRRVVVVVVVSSSSSSEEEEEEEEEQQQQQQQQQFFFFFFFFFFFTTTTTTTAAAAAMMMMMMMMFFFFFFFFFFFRRRRRRRRRRRRRRRRRRRRRRKKKKKKKKKAAAAAFFFFFFFFFFFLLLLLLLLHHHHHHHHHHWWWWWWWWWWWWWWYYYYYYYYYYYYTTTTTTTGGGGEEEEEEEEEGGGGMMMMMMMMDDDDDDDDEEEEEEEEEMMMMMMMMEEEEEEEEEFFFFFFFFFFFTTTTTTTEEEEEEEEEAAAAAEEEEEEEEESSSSSSNNNNNNNNMMMMMMMMNNNNNNNNDDDDDDDDLLLLLLLLVVVVVVVSSSSSSEEEEEEEEEYYYYYYYYYYYYQQQQQQQQQQQQQQQQQQYYYYYYYYYYYYQQQQQQQQQDDDDDDDDAAAAATTTTTTTAAAAADDDDDDDDEEEEEEEEEEEEEEEEEEGGGGDDDDDDDDYYYYYYYYYYYYEEEEEEEEEDDDDDDDDEEEEEEEEEDDDDDDDDEEEEEEEEEAAAAALLLLLLLLHHHHHHHHHHDDDDDDDDEEEEEEEEEE

SEQ ID NO: 177 - protein, 3537 aa, Homo sapiens
MMMMMMMMRRRRRRRRRRREEEEEEEEEIIIIIIIIVVVVVVVHHHHHHHHHHIIIIIIIIQQQQQQQQQAAAAAGGGGQQQQQQQQQCCCCCCGGGGNNNNNNNNQQQQQQQQQIIIIIIIIGGGGAAAAAKKKKKKKKKFFFFFFFFFFFWWWWWWWWWWWWWWEEEEEEEEEVVVVVVVIIIIIIIISSSSSSDDDDDDDDEEEEEEEEEHHHHHHHHHHGGGGIIIIIIIIDDDDDDDDPPPPPPPSSSSSSGGGGNNNNNNNNYYYYYYYYYYYYVVVVVVVGGGGDDDDDDDDSSSSSSDDDDDDDDLLLLLLLLQQQQQQQQQLLLLLLLLEEEEEEEEERRRRRRRRRRRIIIIIIIISSSSSSVVVVVVVYYYYYYYYYYYYYYYYYYYYYYYYNNNNNNNNEEEEEEEEEAAAAASSSSSSSSSSSSHHHHHHHHHHKKKKKKKKKYYYYYYYYYYYYVVVVVVVPPPPPPPRRRRRRRRRRRAAAAAIIIIIIIILLLLLLLLVVVVVVVDDDDDDDDLLLLLLLLEEEEEEEEEPPPPPPPGGGGTTTTTTTMMMMMMMMDDDDDDDDSSSSSSVVVVVVVRRRRRRRRRRRSSSSSSGGGGAAAAAFFFFFFFFFFFGGGGHHHHHHHHHHLLLLLLLLFFFFFFFFFFFRRRRRRRRRRRPPPPPPPDDDDDDDDNNNNNNNNFFFFFFFFFFFIIIIIIIIFFFFFFFFFFFGGGGQQQQQQQQQSSSSSSGGGGAAAAAGGGGNNNNNNNNNNNNNNNNWWWWWWWWWWWWWWAAAAAKKKKKKKKKGGGGHHHHHHHHHHYYYYYYYYYYYYTTTTTTTEEEEEEEEEGGGGAAAAAEEEEEEEEELLLLLLLLVVVVVVVDDDDDDDDSSSSSSVVVVVVVLLLLLLLLDDDDDDDDVVVVVVVVVVVVVVRRRRRRRRRRRKKKKKKKKKEEEEEEEEECCCCCCEEEEEEEEENNNNNNNNCCCCCCDDDDDDDDCCCCCCLLLLLLLLQQQQQQQQQGGGGFFFFFFFFFFFQQQQQQQQQLLLLLLLLTTTTTTTHHHHHHHHHHSSSSSSLLLLLLLLGGGGGGGGGGGGTTTTTTTGGGGSSSSSSGGGGMMMMMMMMGGGGTTTTTTTLLLLLLLLLLLLLLLLIIIIIIIISSSSSSKKKKKKKKKVVVVVVVRRRRRRRRRRREEEEEEEEEEEEEEEEEEYYYYYYYYYYYYPPPPPPPDDDDDDDDRRRRRRRRRRRIIIIIIIIMMMMMMMMNNNNNNNNTTTTTTTFFFFFFFFFFFSSSSSSVVVVVVVVVVVVVVPPPPPPPSSSSSSPPPPPPPKKKKKKKKKVVVVVVVSSSSSSDDDDDDDDTTTTTTTVVVVVVVVVVVVVVEEEEEEEEEPPPPPPPYYYYYYYYYYYYNNNNNNNNAAAAATTTTTTTLLLLLLLLSSSSSSIIIIIIIIHHHHHHHHHHQQQQQQQQQLLLLLLLLVVVVVVVEEEEEEEEENNNNNNNNTTTTTTTDDDDDDDDEEEEEEEEETTTTTTTYYYYYYYYYYYYCCCCCCIIIIIIIIDDDDDDDDNNNNNNNNEEEEEEEEEAAAAALLLLLLLLYYYYYYYYYYYYDDDDDDDDIIIIIIIICCCCCCFFFFFFFFFFFRRRRRRRRRRRTTTTTTTLLLLLLLLKKKKKKKKKLLLLLLLLAAAAATTTTTTTPPPPPPPTTTTTTTYYYYYYYYYYYYGGGGDDDDDDDDLLLLLLLLNNNNNNNNHHHHHHHHHHLLLLLLLLVVVVVVVSSSSSSAAAAATTTTTTTMMMMMMMMSSSSSSGGGGVVVVVVVTTTTTTTTTTTTTTSSSSSSLLLLLLLLRRRRRRRRRRRFFFFFFFFFFFPPPPPPPGGGGQQQQQQQQQLLLLLLLLNNNNNNNNAAAAADDDDDDDDLLLLLLLLRRRRRRRRRRRKKKKKKKKKLLLLLLLLAAAAAVVVVVVVNNNNNNNNMMMMMMMMVVVVVVVPPPPPPPFFFFFFFFFFFPPPPPPPRRRRRRRRRRRLLLLLLLLHHHHHHHHHHFFFFFFFFFFFFFFFFFFFFFFMMMMMMMMPPPPPPPGGGGFFFFFFFFFFFAAAAAPPPPPPPLLLLLLLLTTTTTTTAAAAARRRRRRRRRRRGGGGSSSSSSQQQQQQQQQQQQQQQQQQYYYYYYYYYYYYRRRRRRRRRRRAAAAALLLLLLLLTTTTTTTVVVVVVVPPPPPPPEEEEEEEEELLLLLLLLTTTTTTTQQQQQQQQQQQQQQQQQQMMMMMMMMFFFFFFFFFFFDDDDDDDDAAAAAKKKKKKKKKNNNNNNNNMMMMMMMMMMMMMMMMAAAAAAAAAACCCCCCDDDDDDDDPPPPPPPRRRRRRRRRRRHHHHHHHHHHGGGGRRRRRRRRRRRYYYYYYYYYYYYLLLLLLLLTTTTTTTVVVVVVVAAAAATTTTTTTVVVVVVVFFFFFFFFFFFRRRRRRRRRRRGGGGRRRRRRRRRRRMMMMMMMMSSSSSSMMMMMMMMKKKKKKKKKEEEEEEEEEVVVVVVVDDDDDDDDEEEEEEEEEQQQQQQQQQMMMMMMMMLLLLLLLLAAAAAIIIIIIIIQQQQQQQQQSSSSSSKKKKKKKKKNNNNNNNNSSSSSSSSSSSSYYYYYYYYYYYYFFFFFFFFFFFVVVVVVVEEEEEEEEEWWWWWWWWWWWWWWIIIIIIIIPPPPPPPNNNNNNNNNNNNNNNNVVVVVVVKKKKKKKKKVVVVVVVAAAAAVVVVVVVCCCCCCDDDDDDDDIIIIIIIIPPPPPPPPPPPPPPRRRRRRRRRRRGGGGLLLLLLLLKKKKKKKKKMMMMMMMMSSSSSSSSSSSSTTTTTTTFFFFFFFFFFFIIIIIIIIGGGGNNNNNNNNSSSSSSTTTTTTTAAAAAIIIIIIIIQQQQQQQQQEEEEEEEEELLLLLLLLFFFFFFFFFFFKKKKKKKKKRRRRRRRRRRRIIIIIIIISSSSSSEEEEEEEEEQQQQQQQQQFFFFFFFFFFFTTTTTTTAAAAAMMMMMMMMFFFFFFFFFFFRRRRRRRRRRRRRRRRRRRRRRKKKKKKKKKAAAAAFFFFFFFFFFFLLLLLLLLHHHHHHHHHHWWWWWWWWWWWWWWYYYYYYYYYYYYTTTTTTTGGGGEEEEEEEEEGGGGMMMMMMMMDDDDDDDDEEEEEEEEEMMMMMMMMEEEEEEEEEFFFFFFFFFFFTTTTTTTEEEEEEEEEAAAAAEEEEEEEEESSSSSSNNNNNNNNMMMMMMMMNNNNNNNNDDDDDDDDLLLLLLLLVVVVVVVSSSSSSEEEEEEEEEYYYYYYYYYYYYQQQQQQQQQQQQQQQQQQYYYYYYYYYYYYQQQQQQQQQDDDDDDDDAAAAATTTTTTTAAAAAEEEEEEEEEEEEEEEEEEEEEEEEEEEGGGGEEEEEEEEEMMMMMMMMYYYYYYYYYYYYEEEEEEEEEDDDDDDDDDDDDDDDDEEEEEEEEEEEEEEEEEEEEEEEEEEESSSSSSEEEEEEEEEAAAAAQQQQQQQQQGGGGPPPPPPPKKKKKKKKKK

SEQ ID NO: 178 - protein, 3509 aa, Zea mays
MMMMMMMMRRRRRRRRRRREEEEEEEEEIIIIIIIILLLLLLLLHHHHHHHHHHIIIIIIIIQQQQQQQQQGGGGGGGGQQQQQQQQQCCCCCCGGGGNNNNNNNNQQQQQQQQQIIIIIIIIGGGGAAAAAKKKKKKKKKFFFFFFFFFFFWWWWWWWWWWWWWWEEEEEEEEEVVVVVVVIIIIIIIICCCCCCGGGGEEEEEEEEEHHHHHHHHHHCCCCCCVVVVVVVDDDDDDDDSSSSSSTTTTTTTGGGGRRRRRRRRRRRYYYYYYYYYYYYSSSSSSGGGGTTTTTTTSSSSSSSSSSSSQQQQQQQQQQQQQQQQQQLLLLLLLLEEEEEEEEELLLLLLLLEEEEEEEEERRRRRRRRRRRIIIIIIIINNNNNNNNVVVVVVVYYYYYYYYYYYYYYYYYYYYYYYYNNNNNNNNEEEEEEEEEAAAAAGGGGGGGGGGGGRRRRRRRRRRRYYYYYYYYYYYYVVVVVVVPPPPPPPRRRRRRRRRRRAAAAAVVVVVVVLLLLLLLLMMMMMMMMDDDDDDDDLLLLLLLLEEEEEEEEEPPPPPPPGGGGTTTTTTTMMMMMMMMEEEEEEEEESSSSSSIIIIIIIIRRRRRRRRRRRAAAAAGGGGPPPPPPPFFFFFFFFFFFGGGGGGGGIIIIIIIIFFFFFFFFFFFRRRRRRRRRRRPPPPPPPDDDDDDDDNNNNNNNNFFFFFFFFFFFVVVVVVVYYYYYYYYYYYYGGGGQQQQQQQQQSSSSSSGGGGAAAAAGGGGNNNNNNNNNNNNNNNNWWWWWWWWWWWWWWAAAAAKKKKKKKKKGGGGHHHHHHHHHHYYYYYYYYYYYYTTTTTTTEEEEEEEEEGGGGAAAAAEEEEEEEEELLLLLLLLIIIIIIIIDDDDDDDDSSSSSSVVVVVVVLLLLLLLLDDDDDDDDVVVVVVVVVVVVVVRRRRRRRRRRRKKKKKKKKKEEEEEEEEEAAAAAEEEEEEEEENNNNNNNNCCCCCCDDDDDDDDCCCCCCLLLLLLLLQQQQQQQQQGGGGFFFFFFFFFFFQQQQQQQQQVVVVVVVCCCCCCHHHHHHHHHHSSSSSSLLLLLLLLGGGGGGGGGGGGTTTTTTTGGGGSSSSSSGGGGMMMMMMMMGGGGTTTTTTTLLLLLLLLLLLLLLLLIIIIIIIISSSSSSKKKKKKKKKIIIIIIIIRRRRRRRRRRREEEEEEEEEEEEEEEEEEYYYYYYYYYYYYPPPPPPPDDDDDDDDRRRRRRRRRRRMMMMMMMMMMMMMMMMLLLLLLLLTTTTTTTFFFFFFFFFFFSSSSSSVVVVVVVFFFFFFFFFFFPPPPPPPSSSSSSPPPPPPPKKKKKKKKKVVVVVVVSSSSSSDDDDDDDDTTTTTTTVVVVVVVVVVVVVVEEEEEEEEEPPPPPPPYYYYYYYYYYYYNNNNNNNNAAAAATTTTTTTLLLLLLLLSSSSSSVVVVVVVHHHHHHHHHHQQQQQQQQQLLLLLLLLVVVVVVVEEEEEEEEENNNNNNNNAAAAADDDDDDDDEEEEEEEEECCCCCCMMMMMMMMVVVVVVVLLLLLLLLDDDDDDDDNNNNNNNNEEEEEEEEEAAAAALLLLLLLLYYYYYYYYYYYYDDDDDDDDIIIIIIIICCCCCCFFFFFFFFFFFRRRRRRRRRRRTTTTTTTLLLLLLLLKKKKKKKKKLLLLLLLLTTTTTTTNNNNNNNNPPPPPPPSSSSSSFFFFFFFFFFFGGGGDDDDDDDDLLLLLLLLNNNNNNNNHHHHHHHHHHLLLLLLLLIIIIIIIISSSSSSAAAAATTTTTTTMMMMMMMMSSSSSSGGGGVVVVVVVTTTTTTTCCCCCCCCCCCCLLLLLLLLRRRRRRRRRRRFFFFFFFFFFFPPPPPPPGGGGQQQQQQQQQLLLLLLLLNNNNNNNNSSSSSSDDDDDDDDLLLLLLLLRRRRRRRRRRRKKKKKKKKKLLLLLLLLAAAAAVVVVVVVNNNNNNNNLLLLLLLLIIIIIIIIPPPPPPPFFFFFFFFFFFPPPPPPPRRRRRRRRRRRLLLLLLLLHHHHHHHHHHFFFFFFFFFFFFFFFFFFFFFFMMMMMMMMVVVVVVVGGGGFFFFFFFFFFFAAAAAPPPPPPPLLLLLLLLTTTTTTTSSSSSSRRRRRRRRRRRGGGGSSSSSSQQQQQQQQQQQQQQQQQQYYYYYYYYYYYYRRRRRRRRRRRAAAAALLLLLLLLTTTTTTTVVVVVVVPPPPPPPEEEEEEEEELLLLLLLLTTTTTTTQQQQQQQQQQQQQQQQQQMMMMMMMMWWWWWWWWWWWWWWDDDDDDDDAAAAAKKKKKKKKKNNNNNNNNMMMMMMMMMMMMMMMMCCCCCCSSSSSSAAAAADDDDDDDDPPPPPPPRRRRRRRRRRRHHHHHHHHHHGGGGRRRRRRRRRRRYYYYYYYYYYYYLLLLLLLLTTTTTTTAAAAASSSSSSAAAAAMMMMMMMMFFFFFFFFFFFRRRRRRRRRRRGGGGKKKKKKKKKMMMMMMMMSSSSSSTTTTTTTKKKKKKKKKEEEEEEEEEVVVVVVVDDDDDDDDEEEEEEEEEQQQQQQQQQMMMMMMMMIIIIIIIINNNNNNNNVVVVVVVQQQQQQQQQNNNNNNNNKKKKKKKKKNNNNNNNNSSSSSSSSSSSSYYYYYYYYYYYYFFFFFFFFFFFVVVVVVVEEEEEEEEEWWWWWWWWWWWWWWIIIIIIIIPPPPPPPNNNNNNNNNNNNNNNNVVVVVVVKKKKKKKKKSSSSSSSSSSSSVVVVVVVCCCCCCDDDDDDDDIIIIIIIIPPPPPPPPPPPPPPVVVVVVVGGGGLLLLLLLLPPPPPPPMMMMMMMMAAAAASSSSSSTTTTTTTFFFFFFFFFFFVVVVVVVGGGGNNNNNNNNSSSSSSTTTTTTTSSSSSSIIIIIIIIQQQQQQQQQEEEEEEEEEMMMMMMMMFFFFFFFFFFFRRRRRRRRRRRRRRRRRRRRRRVVVVVVVSSSSSSEEEEEEEEEQQQQQQQQQFFFFFFFFFFFTTTTTTTAAAAAMMMMMMMMFFFFFFFFFFFRRRRRRRRRRRRRRRRRRRRRRKKKKKKKKKAAAAAFFFFFFFFFFFLLLLLLLLHHHHHHHHHHWWWWWWWWWWWWWWYYYYYYYYYYYYTTTTTTTSSSSSSEEEEEEEEEGGGGMMMMMMMMDDDDDDDDEEEEEEEEEMMMMMMMMEEEEEEEEEFFFFFFFFFFFTTTTTTTEEEEEEEEEAAAAAEEEEEEEEESSSSSSNNNNNNNNMMMMMMMMNNNNNNNNDDDDDDDDLLLLLLLLVVVVVVVAAAAAEEEEEEEEEYYYYYYYYYYYYQQQQQQQQQQQQQQQQQQYYYYYYYYYYYYQQQQQQQQQDDDDDDDDAAAAATTTTTTTAAAAAEEEEEEEEEEEEEEEEEEYYYYYYYYYYYYEEEEEEEEEEEEEEEEEEEEEEEEEEEEEEEEEEEEHHHHHHHHHHDDDDDDDDGGGGEEEEEEEEEEEEEEEEEEEEEEEEEEEHHHHHHHHHHAAAAAA

SEQ ID NO: 179 - protein, 3524 aa, Porphyra purpurea
MMMMMMMMRRRRRRRRRRREEEEEEEEEIIIIIIIIVVVVVVVHHHHHHHHHHIIIIIIIIQQQQQQQQQGGGGGGGGQQQQQQQQQCCCCCCGGGGDDDDDDDDQQQQQQQQQIIIIIIIIGGGGAAAAAKKKKKKKKKFFFFFFFFFFFWWWWWWWWWWWWWWEEEEEEEEEVVVVVVVIIIIIIIISSSSSSDDDDDDDDEEEEEEEEEHHHHHHHHHHGGGGIIIIIIIIDDDDDDDDPPPPPPPTTTTTTTGGGGTTTTTTTYYYYYYYYYYYYNNNNNNNNGGGGDDDDDDDDSSSSSSDDDDDDDDLLLLLLLLQQQQQQQQQLLLLLLLLEEEEEEEEERRRRRRRRRRRVVVVVVVNNNNNNNNVVVVVVVYYYYYYYYYYYYYYYYYYYYYYYYNNNNNNNNEEEEEEEEEAAAAATTTTTTTGGGGGGGGRRRRRRRRRRRYYYYYYYYYYYYVVVVVVVPPPPPPPRRRRRRRRRRRAAAAAVVVVVVVLLLLLLLLMMMMMMMMDDDDDDDDLLLLLLLLEEEEEEEEEPPPPPPPGGGGTTTTTTTMMMMMMMMDDDDDDDDSSSSSSVVVVVVVRRRRRRRRRRRAAAAAGGGGPPPPPPPYYYYYYYYYYYYGGGGQQQQQQQQQLLLLLLLLFFFFFFFFFFFRRRRRRRRRRRPPPPPPPDDDDDDDDNNNNNNNNFFFFFFFFFFFVVVVVVVFFFFFFFFFFFGGGGQQQQQQQQQTTTTTTTGGGGAAAAAGGGGNNNNNNNNNNNNNNNNWWWWWWWWWWWWWWAAAAAKKKKKKKKKGGGGHHHHHHHHHHYYYYYYYYYYYYTTTTTTTEEEEEEEEEGGGGAAAAAEEEEEEEEELLLLLLLLIIIIIIIIDDDDDDDDSSSSSSVVVVVVVLLLLLLLLDDDDDDDDVVVVVVVVVVVVVVRRRRRRRRRRRKKKKKKKKKEEEEEEEEEAAAAAEEEEEEEEEQQQQQQQQQCCCCCCDDDDDDDDCCCCCCLLLLLLLLQQQQQQQQQGGGGFFFFFFFFFFFQQQQQQQQQVVVVVVVTTTTTTTHHHHHHHHHHSSSSSSLLLLLLLLGGGGGGGGGGGGTTTTTTTGGGGSSSSSSGGGGMMMMMMMMGGGGTTTTTTTLLLLLLLLLLLLLLLLIIIIIIIISSSSSSKKKKKKKKKIIIIIIIIRRRRRRRRRRREEEEEEEEEEEEEEEEEEYYYYYYYYYYYYPPPPPPPDDDDDDDDRRRRRRRRRRRVVVVVVVMMMMMMMMMMMMMMMMTTTTTTTFFFFFFFFFFFSSSSSSVVVVVVVCCCCCCPPPPPPPSSSSSSPPPPPPPKKKKKKKKKVVVVVVVSSSSSSDDDDDDDDTTTTTTTVVVVVVVVVVVVVVEEEEEEEEEPPPPPPPYYYYYYYYYYYYNNNNNNNNAAAAATTTTTTTLLLLLLLLSSSSSSVVVVVVVHHHHHHHHHHQQQQQQQQQLLLLLLLLVVVVVVVEEEEEEEEENNNNNNNNAAAAADDDDDDDDEEEEEEEEEVVVVVVVMMMMMMMMVVVVVVVLLLLLLLLDDDDDDDDNNNNNNNNEEEEEEEEEAAAAALLLLLLLLYYYYYYYYYYYYDDDDDDDDIIIIIIIICCCCCCFFFFFFFFFFFRRRRRRRRRRRTTTTTTTLLLLLLLLKKKKKKKKKLLLLLLLLTTTTTTTTTTTTTTPPPPPPPTTTTTTTYYYYYYYYYYYYGGGGDDDDDDDDLLLLLLLLNNNNNNNNHHHHHHHHHHLLLLLLLLVVVVVVVCCCCCCVVVVVVVCCCCCCMMMMMMMMSSSSSSGGGGVVVVVVVTTTTTTTSSSSSSSSSSSSLLLLLLLLRRRRRRRRRRRFFFFFFFFFFFPPPPPPPGGGGQQQQQQQQQLLLLLLLLNNNNNNNNAAAAADDDDDDDDLLLLLLLLRRRRRRRRRRRKKKKKKKKKLLLLLLLLAAAAAVVVVVVVNNNNNNNNLLLLLLLLIIIIIIIIPPPPPPPFFFFFFFFFFFPPPPPPPRRRRRRRRRRRLLLLLLLLHHHHHHHHHHFFFFFFFFFFFFFFFFFFFFFFMMMMMMMMLLLLLLLLGGGGFFFFFFFFFFFAAAAAPPPPPPPLLLLLLLLTTTTTTTSSSSSSRRRRRRRRRRRGGGGSSSSSSQQQQQQQQQQQQQQQQQQYYYYYYYYYYYYRRRRRRRRRRRAAAAALLLLLLLLTTTTTTTVVVVVVVPPPPPPPEEEEEEEEELLLLLLLLTTTTTTTSSSSSSQQQQQQQQQCCCCCCFFFFFFFFFFFDDDDDDDDAAAAAKKKKKKKKKNNNNNNNNMMMMMMMMMMMMMMMMCCCCCCAAAAAAAAAADDDDDDDDPPPPPPPRRRRRRRRRRRHHHHHHHHHHGGGGRRRRRRRRRRRYYYYYYYYYYYYLLLLLLLLTTTTTTTAAAAASSSSSSCCCCCCMMMMMMMMFFFFFFFFFFFRRRRRRRRRRRGGGGRRRRRRRRRRRMMMMMMMMSSSSSSTTTTTTTKKKKKKKKKEEEEEEEEEVVVVVVVDDDDDDDDEEEEEEEEEQQQQQQQQQMMMMMMMMLLLLLLLLNNNNNNNNVVVVVVVQQQQQQQQQNNNNNNNNKKKKKKKKKNNNNNNNNSSSSSSSSSSSSYYYYYYYYYYYYFFFFFFFFFFFVVVVVVVEEEEEEEEEWWWWWWWWWWWWWWIIIIIIIIPPPPPPPNNNNNNNNNNNNNNNNIIIIIIIIKKKKKKKKKSSSSSSSSSSSSVVVVVVVCCCCCCDDDDDDDDIIIIIIIIPPPPPPPPPPPPPPKKKKKKKKKGGGGLLLLLLLLKKKKKKKKKMMMMMMMMSSSSSSAAAAATTTTTTTFFFFFFFFFFFVVVVVVVGGGGNNNNNNNNSSSSSSTTTTTTTAAAAAIIIIIIIIQQQQQQQQQEEEEEEEEEMMMMMMMMFFFFFFFFFFFKKKKKKKKKRRRRRRRRRRRVVVVVVVGGGGEEEEEEEEEQQQQQQQQQFFFFFFFFFFFTTTTTTTAAAAAMMMMMMMMFFFFFFFFFFFRRRRRRRRRRRRRRRRRRRRRRKKKKKKKKKAAAAAFFFFFFFFFFFLLLLLLLLHHHHHHHHHHWWWWWWWWWWWWWWYYYYYYYYYYYYTTTTTTTGGGGEEEEEEEEEGGGGMMMMMMMMDDDDDDDDEEEEEEEEEMMMMMMMMEEEEEEEEEFFFFFFFFFFFTTTTTTTEEEEEEEEEAAAAAEEEEEEEEESSSSSSNNNNNNNNMMMMMMMMNNNNNNNNDDDDDDDDLLLLLLLLVVVVVVVSSSSSSEEEEEEEEEYYYYYYYYYYYYQQQQQQQQQQQQQQQQQQYYYYYYYYYYYYQQQQQQQQQDDDDDDDDAAAAATTTTTTTAAAAAEEEEEEEEEEEEEEEEEEEEEEEEEEEGGGGEEEEEEEEEYYYYYYYYYYYYDDDDDDDDEEEEEEEEEDDDDDDDDDDDDDDDDGGGGGGGGYYYYYYYYYYYYGGGGDDDDDDDDEEEEEEEEEDDDDDDDDDDDDDDDDGGGGMMMMMMMMMMMMMMMMM

SEQ ID NO: 180 - protein, 3497 aa, Triticum aestivum
MMMMMMMMRRRRRRRRRRREEEEEEEEEIIIIIIIILLLLLLLLHHHHHHHHHHIIIIIIIIQQQQQQQQQGGGGGGGGQQQQQQQQQCCCCCCGGGGNNNNNNNNQQQQQQQQQIIIIIIIIGGGGAAAAAKKKKKKKKKFFFFFFFFFFFWWWWWWWWWWWWWWEEEEEEEEEVVVVVVVIIIIIIIICCCCCCDDDDDDDDEEEEEEEEEHHHHHHHHHHGGGGIIIIIIIIDDDDDDDDGGGGTTTTTTTGGGGRRRRRRRRRRRYYYYYYYYYYYYAAAAAGGGGDDDDDDDDSSSSSSDDDDDDDDLLLLLLLLQQQQQQQQQLLLLLLLLEEEEEEEEERRRRRRRRRRRIIIIIIIINNNNNNNNVVVVVVVYYYYYYYYYYYYYYYYYYYYYYYYNNNNNNNNEEEEEEEEEAAAAASSSSSSGGGGGGGGRRRRRRRRRRRFFFFFFFFFFFVVVVVVVPPPPPPPRRRRRRRRRRRAAAAAVVVVVVVLLLLLLLLMMMMMMMMDDDDDDDDLLLLLLLLEEEEEEEEEPPPPPPPGGGGTTTTTTTMMMMMMMMDDDDDDDDSSSSSSVVVVVVVRRRRRRRRRRRSSSSSSGGGGPPPPPPPFFFFFFFFFFFGGGGQQQQQQQQQIIIIIIIIFFFFFFFFFFFRRRRRRRRRRRPPPPPPPDDDDDDDDNNNNNNNNFFFFFFFFFFFVVVVVVVFFFFFFFFFFFGGGGQQQQQQQQQSSSSSSGGGGAAAAAGGGGNNNNNNNNNNNNNNNNWWWWWWWWWWWWWWAAAAAKKKKKKKKKGGGGHHHHHHHHHHYYYYYYYYYYYYTTTTTTTEEEEEEEEEGGGGAAAAAEEEEEEEEELLLLLLLLIIIIIIIIDDDDDDDDSSSSSSVVVVVVVLLLLLLLLDDDDDDDDVVVVVVVVVVVVVVRRRRRRRRRRRKKKKKKKKKEEEEEEEEEAAAAAEEEEEEEEENNNNNNNNCCCCCCDDDDDDDDCCCCCCLLLLLLLLQQQQQQQQQGGGGFFFFFFFFFFFQQQQQQQQQVVVVVVVCCCCCCHHHHHHHHHHSSSSSSLLLLLLLLGGGGGGGGGGGGTTTTTTTGGGGSSSSSSGGGGMMMMMMMMGGGGTTTTTTTLLLLLLLLLLLLLLLLIIIIIIIISSSSSSKKKKKKKKKIIIIIIIIRRRRRRRRRRREEEEEEEEEEEEEEEEEEYYYYYYYYYYYYPPPPPPPDDDDDDDDRRRRRRRRRRRMMMMMMMMMMMMMMMMLLLLLLLLTTTTTTTFFFFFFFFFFFSSSSSSVVVVVVVFFFFFFFFFFFPPPPPPPSSSSSSPPPPPPPKKKKKKKKKVVVVVVVSSSSSSDDDDDDDDTTTTTTTVVVVVVVVVVVVVVEEEEEEEEEPPPPPPPYYYYYYYYYYYYNNNNNNNNAAAAATTTTTTTLLLLLLLLSSSSSSVVVVVVVHHHHHHHHHHQQQQQQQQQLLLLLLLLVVVVVVVEEEEEEEEENNNNNNNNAAAAADDDDDDDDEEEEEEEEECCCCCCMMMMMMMMVVVVVVVLLLLLLLLDDDDDDDDNNNNNNNNEEEEEEEEEAAAAALLLLLLLLYYYYYYYYYYYYDDDDDDDDIIIIIIIICCCCCCFFFFFFFFFFFRRRRRRRRRRRTTTTTTTLLLLLLLLKKKKKKKKKLLLLLLLLAAAAATTTTTTTPPPPPPPSSSSSSFFFFFFFFFFFGGGGEEEEEEEEELLLLLLLLNNNNNNNNHHHHHHHHHHLLLLLLLLIIIIIIIISSSSSSAAAAATTTTTTTMMMMMMMMSSSSSSGGGGVVVVVVVTTTTTTTCCCCCCCCCCCCLLLLLLLLRRRRRRRRRRRFFFFFFFFFFFPPPPPPPGGGGQQQQQQQQQLLLLLLLLNNNNNNNNSSSSSSDDDDDDDDLLLLLLLLRRRRRRRRRRRKKKKKKKKKLLLLLLLLAAAAAVVVVVVVNNNNNNNNLLLLLLLLIIIIIIIIPPPPPPPFFFFFFFFFFFPPPPPPPRRRRRRRRRRRLLLLLLLLHHHHHHHHHHFFFFFFFFFFFFFFFFFFFFFFMMMMMMMMVVVVVVVGGGGFFFFFFFFFFFAAAAAPPPPPPPLLLLLLLLTTTTTTTSSSSSSRRRRRRRRRRRGGGGSSSSSSQQQQQQQQQMMMMMMMMYYYYYYYYYYYYRRRRRRRRRRRAAAAALLLLLLLLTTTTTTTVVVVVVVPPPPPPPEEEEEEEEELLLLLLLLTTTTTTTQQQQQQQQQQQQQQQQQQMMMMMMMMWWWWWWWWWWWWWWDDDDDDDDAAAAAKKKKKKKKKNNNNNNNNMMMMMMMMMMMMMMMMCCCCCCAAAAAAAAAADDDDDDDDPPPPPPPRRRRRRRRRRRHHHHHHHHHHGGGGRRRRRRRRRRRYYYYYYYYYYYYLLLLLLLLTTTTTTTAAAAASSSSSSAAAAACCCCCCFFFFFFFFFFFRRRRRRRRRRRGGGGKKKKKKKKKMMMMMMMMSSSSSSTTTTTTTKKKKKKKKKEEEEEEEEEVVVVVVVDDDDDDDDEEEEEEEEEQQQQQQQQQMMMMMMMMLLLLLLLLNNNNNNNNVVVVVVVQQQQQQQQQNNNNNNNNKKKKKKKKKNNNNNNNNSSSSSSSSSSSSYYYYYYYYYYYYFFFFFFFFFFFVVVVVVVEEEEEEEEEWWWWWWWWWWWWWWIIIIIIIIPPPPPPPNNNNNNNNNNNNNNNNVVVVVVVKKKKKKKKKSSSSSSSSSSSSVVVVVVVCCCCCCDDDDDDDDMMMMMMMMPPPPPPPPPPPPPPRRRRRRRRRRRGGGGLLLLLLLLKKKKKKKKKMMMMMMMMAAAAAGGGGTTTTTTTFFFFFFFFFFFVVVVVVVGGGGNNNNNNNNSSSSSSTTTTTTTSSSSSSIIIIIIIIQQQQQQQQQEEEEEEEEEMMMMMMMMFFFFFFFFFFFRRRRRRRRRRRRRRRRRRRRRRVVVVVVVSSSSSSEEEEEEEEEQQQQQQQQQFFFFFFFFFFFTTTTTTTAAAAAMMMMMMMMFFFFFFFFFFFRRRRRRRRRRRRRRRRRRRRRRKKKKKKKKKAAAAAFFFFFFFFFFFLLLLLLLLHHHHHHHHHHWWWWWWWWWWWWWWYYYYYYYYYYYYTTTTTTTGGGGEEEEEEEEEGGGGMMMMMMMMDDDDDDDDEEEEEEEEEMMMMMMMMEEEEEEEEEFFFFFFFFFFFTTTTTTTEEEEEEEEEAAAAAEEEEEEEEESSSSSSNNNNNNNNMMMMMMMMNNNNNNNNDDDDDDDDLLLLLLLLVVVVVVVAAAAAEEEEEEEEEYYYYYYYYYYYYQQQQQQQQQQQQQQQQQQYYYYYYYYYYYYQQQQQQQQQDDDDDDDDAAAAATTTTTTTAAAAADDDDDDDDEEEEEEEEEEEEEEEEEEYYYYYYYYYYYYDDDDDDDDEEEEEEEEEEEEEEEEEEEEEEEEEEEEEEEEEEEEEEEEEEEEEEEEEEEEEERRRRRRRRRRRDDDDDDDDAAAAAEEEEEEEEEE

SEQ ID NO: 181 - protein, 3495 aa, Xenopus laevis
MMMMMMMMRRRRRRRRRRREEEEEEEEEIIIIIIIIVVVVVVVHHHHHHHHHHLLLLLLLLQQQQQQQQQAAAAAGGGGQQQQQQQQQCCCCCCGGGGNNNNNNNNQQQQQQQQQIIIIIIIIGGGGAAAAAKKKKKKKKKFFFFFFFFFFFWWWWWWWWWWWWWWEEEEEEEEEVVVVVVVIIIIIIIISSSSSSDDDDDDDDEEEEEEEEEHHHHHHHHHHGGGGIIIIIIIIDDDDDDDDPPPPPPPTTTTTTTGGGGAAAAAYYYYYYYYYYYYHHHHHHHHHHGGGGDDDDDDDDSSSSSSDDDDDDDDLLLLLLLLQQQQQQQQQLLLLLLLLEEEEEEEEERRRRRRRRRRRIIIIIIIINNNNNNNNVVVVVVVYYYYYYYYYYYYYYYYYYYYYYYYNNNNNNNNEEEEEEEEEAAAAATTTTTTTGGGGGGGGKKKKKKKKKYYYYYYYYYYYYVVVVVVVPPPPPPPRRRRRRRRRRRAAAAAVVVVVVVLLLLLLLLVVVVVVVDDDDDDDDLLLLLLLLEEEEEEEEEPPPPPPPGGGGTTTTTTTMMMMMMMMDDDDDDDDSSSSSSVVVVVVVRRRRRRRRRRRSSSSSSGGGGPPPPPPPFFFFFFFFFFFGGGGQQQQQQQQQIIIIIIIIFFFFFFFFFFFRRRRRRRRRRRPPPPPPPDDDDDDDDNNNNNNNNFFFFFFFFFFFVVVVVVVFFFFFFFFFFFGGGGQQQQQQQQQSSSSSSGGGGAAAAAGGGGNNNNNNNNNNNNNNNNWWWWWWWWWWWWWWAAAAAKKKKKKKKKGGGGHHHHHHHHHHYYYYYYYYYYYYTTTTTTTEEEEEEEEEGGGGAAAAAEEEEEEEEELLLLLLLLVVVVVVVDDDDDDDDSSSSSSVVVVVVVLLLLLLLLDDDDDDDDVVVVVVVVVVVVVVRRRRRRRRRRRKKKKKKKKKEEEEEEEEEAAAAAEEEEEEEEESSSSSSCCCCCCDDDDDDDDCCCCCCLLLLLLLLQQQQQQQQQGGGGFFFFFFFFFFFQQQQQQQQQLLLLLLLLTTTTTTTHHHHHHHHHHSSSSSSLLLLLLLLGGGGGGGGGGGGTTTTTTTGGGGSSSSSSGGGGMMMMMMMMGGGGTTTTTTTLLLLLLLLLLLLLLLLIIIIIIIISSSSSSKKKKKKKKKIIIIIIIIRRRRRRRRRRREEEEEEEEEEEEEEEEEEYYYYYYYYYYYYPPPPPPPDDDDDDDDRRRRRRRRRRRIIIIIIIIMMMMMMMMNNNNNNNNTTTTTTTFFFFFFFFFFFSSSSSSVVVVVVVVVVVVVVPPPPPPPSSSSSSPPPPPPPKKKKKKKKKVVVVVVVSSSSSSDDDDDDDDTTTTTTTVVVVVVVVVVVVVVEEEEEEEEEPPPPPPPYYYYYYYYYYYYNNNNNNNNAAAAATTTTTTTLLLLLLLLSSSSSSVVVVVVVHHHHHHHHHHQQQQQQQQQLLLLLLLLVVVVVVVEEEEEEEEENNNNNNNNTTTTTTTDDDDDDDDEEEEEEEEETTTTTTTYYYYYYYYYYYYCCCCCCIIIIIIIIDDDDDDDDNNNNNNNNEEEEEEEEEAAAAALLLLLLLLYYYYYYYYYYYYDDDDDDDDIIIIIIIICCCCCCFFFFFFFFFFFRRRRRRRRRRRTTTTTTTLLLLLLLLKKKKKKKKKLLLLLLLLTTTTTTTTTTTTTTPPPPPPPTTTTTTTYYYYYYYYYYYYGGGGDDDDDDDDLLLLLLLLNNNNNNNNHHHHHHHHHHLLLLLLLLVVVVVVVSSSSSSAAAAATTTTTTTMMMMMMMMSSSSSSGGGGVVVVVVVTTTTTTTTTTTTTTCCCCCCLLLLLLLLRRRRRRRRRRRFFFFFFFFFFFPPPPPPPGGGGQQQQQQQQQLLLLLLLLNNNNNNNNAAAAADDDDDDDDLLLLLLLLRRRRRRRRRRRKKKKKKKKKLLLLLLLLAAAAAVVVVVVVNNNNNNNNMMMMMMMMVVVVVVVPPPPPPPFFFFFFFFFFFPPPPPPPRRRRRRRRRRRLLLLLLLLHHHHHHHHHHFFFFFFFFFFFFFFFFFFFFFFMMMMMMMMPPPPPPPGGGGFFFFFFFFFFFAAAAAPPPPPPPLLLLLLLLTTTTTTTSSSSSSRRRRRRRRRRRGGGGSSSSSSQQQQQQQQQQQQQQQQQQYYYYYYYYYYYYRRRRRRRRRRRAAAAALLLLLLLLTTTTTTTVVVVVVVPPPPPPPEEEEEEEEELLLLLLLLTTTTTTTQQQQQQQQQQQQQQQQQQMMMMMMMMFFFFFFFFFFFDDDDDDDDAAAAAKKKKKKKKKNNNNNNNNMMMMMMMMMMMMMMMMAAAAAAAAAACCCCCCDDDDDDDDPPPPPPPRRRRRRRRRRRHHHHHHHHHHGGGGRRRRRRRRRRRYYYYYYYYYYYYLLLLLLLLTTTTTTTVVVVVVVAAAAAAAAAAIIIIIIIIFFFFFFFFFFFRRRRRRRRRRRGGGGRRRRRRRRRRRMMMMMMMMSSSSSSMMMMMMMMKKKKKKKKKEEEEEEEEEVVVVVVVDDDDDDDDEEEEEEEEEQQQQQQQQQMMMMMMMMLLLLLLLLNNNNNNNNVVVVVVVQQQQQQQQQNNNNNNNNKKKKKKKKKNNNNNNNNSSSSSSSSSSSSYYYYYYYYYYYYFFFFFFFFFFFVVVVVVVEEEEEEEEEWWWWWWWWWWWWWWIIIIIIIIPPPPPPPNNNNNNNNNNNNNNNNVVVVVVVKKKKKKKKKTTTTTTTAAAAAVVVVVVVCCCCCCDDDDDDDDIIIIIIIIPPPPPPPPPPPPPPRRRRRRRRRRRGGGGLLLLLLLLKKKKKKKKKMMMMMMMMSSSSSSAAAAATTTTTTTFFFFFFFFFFFIIIIIIIIGGGGNNNNNNNNSSSSSSTTTTTTTAAAAAIIIIIIIIQQQQQQQQQEEEEEEEEELLLLLLLLFFFFFFFFFFFKKKKKKKKKRRRRRRRRRRRIIIIIIIISSSSSSEEEEEEEEEQQQQQQQQQFFFFFFFFFFFTTTTTTTAAAAAMMMMMMMMFFFFFFFFFFFRRRRRRRRRRRRRRRRRRRRRRKKKKKKKKKAAAAAFFFFFFFFFFFLLLLLLLLHHHHHHHHHHWWWWWWWWWWWWWWYYYYYYYYYYYYTTTTTTTGGGGEEEEEEEEEGGGGMMMMMMMMDDDDDDDDEEEEEEEEEMMMMMMMMEEEEEEEEEFFFFFFFFFFFTTTTTTTEEEEEEEEEAAAAAEEEEEEEEESSSSSSNNNNNNNNMMMMMMMMNNNNNNNNDDDDDDDDLLLLLLLLVVVVVVVSSSSSSEEEEEEEEEYYYYYYYYYYYYQQQQQQQQQQQQQQQQQQYYYYYYYYYYYYQQQQQQQQQDDDDDDDDAAAAATTTTTTTAAAAAEEEEEEEEEEEEEEEEEEEEEEEEEEEGGGGEEEEEEEEEFFFFFFFFFFFEEEEEEEEEEEEEEEEEEGGGGEEEEEEEEEEEEEEEEEEEEEEEEEEEEEEEEEEEENNNNNNNNAAAAAA

SEQ ID NO: 182 - protein, 3528 aa, Arabidopsis thaliana
MMMMMMMMRRRRRRRRRRREEEEEEEEEIIIIIIIILLLLLLLLHHHHHHHHHHIIIIIIIIQQQQQQQQQGGGGGGGGQQQQQQQQQCCCCCCGGGGNNNNNNNNQQQQQQQQQIIIIIIIIGGGGSSSSSSKKKKKKKKKFFFFFFFFFFFWWWWWWWWWWWWWWEEEEEEEEEVVVVVVVIIIIIIIICCCCCCDDDDDDDDEEEEEEEEEHHHHHHHHHHGGGGIIIIIIIIDDDDDDDDSSSSSSTTTTTTTGGGGRRRRRRRRRRRYYYYYYYYYYYYSSSSSSGGGGDDDDDDDDTTTTTTTAAAAADDDDDDDDLLLLLLLLQQQQQQQQQLLLLLLLLEEEEEEEEERRRRRRRRRRRIIIIIIIINNNNNNNNVVVVVVVYYYYYYYYYYYYYYYYYYYYYYYYNNNNNNNNEEEEEEEEEAAAAASSSSSSGGGGGGGGRRRRRRRRRRRYYYYYYYYYYYYVVVVVVVPPPPPPPRRRRRRRRRRRAAAAAVVVVVVVLLLLLLLLMMMMMMMMDDDDDDDDLLLLLLLLEEEEEEEEEPPPPPPPGGGGTTTTTTTMMMMMMMMDDDDDDDDSSSSSSIIIIIIIIRRRRRRRRRRRSSSSSSGGGGPPPPPPPFFFFFFFFFFFGGGGQQQQQQQQQIIIIIIIIFFFFFFFFFFFRRRRRRRRRRRPPPPPPPDDDDDDDDNNNNNNNNFFFFFFFFFFFVVVVVVVFFFFFFFFFFFGGGGQQQQQQQQQSSSSSSGGGGAAAAAGGGGNNNNNNNNNNNNNNNNWWWWWWWWWWWWWWAAAAAKKKKKKKKKGGGGHHHHHHHHHHYYYYYYYYYYYYTTTTTTTEEEEEEEEEGGGGAAAAAEEEEEEEEELLLLLLLLIIIIIIIIDDDDDDDDAAAAAVVVVVVVLLLLLLLLDDDDDDDDVVVVVVVVVVVVVVRRRRRRRRRRRKKKKKKKKKEEEEEEEEEAAAAAEEEEEEEEENNNNNNNNCCCCCCDDDDDDDDCCCCCCLLLLLLLLQQQQQQQQQGGGGFFFFFFFFFFFQQQQQQQQQVVVVVVVCCCCCCHHHHHHHHHHSSSSSSLLLLLLLLGGGGGGGGGGGGTTTTTTTGGGGSSSSSSGGGGMMMMMMMMGGGGTTTTTTTLLLLLLLLLLLLLLLLIIIIIIIISSSSSSKKKKKKKKKIIIIIIIIRRRRRRRRRRREEEEEEEEEEEEEEEEEEYYYYYYYYYYYYPPPPPPPDDDDDDDDRRRRRRRRRRRMMMMMMMMMMMMMMMMLLLLLLLLTTTTTTTFFFFFFFFFFFSSSSSSVVVVVVVFFFFFFFFFFFPPPPPPPSSSSSSPPPPPPPKKKKKKKKKVVVVVVVSSSSSSDDDDDDDDTTTTTTTVVVVVVVVVVVVVVEEEEEEEEEPPPPPPPYYYYYYYYYYYYNNNNNNNNAAAAATTTTTTTLLLLLLLLSSSSSSVVVVVVVHHHHHHHHHHQQQQQQQQQLLLLLLLLVVVVVVVEEEEEEEEENNNNNNNNAAAAADDDDDDDDEEEEEEEEECCCCCCMMMMMMMMVVVVVVVLLLLLLLLDDDDDDDDNNNNNNNNEEEEEEEEEAAAAALLLLLLLLYYYYYYYYYYYYDDDDDDDDIIIIIIIICCCCCCFFFFFFFFFFFRRRRRRRRRRRTTTTTTTLLLLLLLLKKKKKKKKKLLLLLLLLSSSSSSTTTTTTTPPPPPPPSSSSSSFFFFFFFFFFFGGGGDDDDDDDDLLLLLLLLNNNNNNNNHHHHHHHHHHLLLLLLLLIIIIIIIISSSSSSAAAAATTTTTTTMMMMMMMMSSSSSSGGGGVVVVVVVTTTTTTTCCCCCCSSSSSSLLLLLLLLRRRRRRRRRRRFFFFFFFFFFFPPPPPPPGGGGQQQQQQQQQLLLLLLLLNNNNNNNNSSSSSSDDDDDDDDLLLLLLLLRRRRRRRRRRRKKKKKKKKKLLLLLLLLAAAAAVVVVVVVNNNNNNNNLLLLLLLLIIIIIIIIPPPPPPPFFFFFFFFFFFPPPPPPPRRRRRRRRRRRLLLLLLLLHHHHHHHHHHFFFFFFFFFFFFFFFFFFFFFFMMMMMMMMVVVVVVVGGGGFFFFFFFFFFFAAAAAPPPPPPPLLLLLLLLTTTTTTTSSSSSSRRRRRRRRRRRGGGGSSSSSSQQQQQQQQQQQQQQQQQQYYYYYYYYYYYYIIIIIIIISSSSSSLLLLLLLLTTTTTTTVVVVVVVPPPPPPPEEEEEEEEELLLLLLLLTTTTTTTQQQQQQQQQQQQQQQQQQMMMMMMMMWWWWWWWWWWWWWWDDDDDDDDSSSSSSKKKKKKKKKNNNNNNNNMMMMMMMMMMMMMMMMCCCCCCAAAAAAAAAADDDDDDDDPPPPPPPRRRRRRRRRRRHHHHHHHHHHGGGGRRRRRRRRRRRYYYYYYYYYYYYLLLLLLLLTTTTTTTAAAAASSSSSSAAAAAIIIIIIIIFFFFFFFFFFFRRRRRRRRRRRGGGGQQQQQQQQQMMMMMMMMSSSSSSTTTTTTTKKKKKKKKKEEEEEEEEEVVVVVVVDDDDDDDDEEEEEEEEEQQQQQQQQQIIIIIIIILLLLLLLLNNNNNNNNIIIIIIIIQQQQQQQQQNNNNNNNNKKKKKKKKKNNNNNNNNSSSSSSSSSSSSYYYYYYYYYYYYFFFFFFFFFFFVVVVVVVEEEEEEEEEWWWWWWWWWWWWWWIIIIIIIIPPPPPPPNNNNNNNNNNNNNNNNVVVVVVVKKKKKKKKKSSSSSSSSSSSSVVVVVVVCCCCCCDDDDDDDDIIIIIIIIPPPPPPPPPPPPPPKKKKKKKKKGGGGLLLLLLLLKKKKKKKKKMMMMMMMMAAAAAAAAAATTTTTTTFFFFFFFFFFFVVVVVVVGGGGNNNNNNNNSSSSSSTTTTTTTSSSSSSIIIIIIIIQQQQQQQQQEEEEEEEEEMMMMMMMMFFFFFFFFFFFRRRRRRRRRRRRRRRRRRRRRRVVVVVVVSSSSSSEEEEEEEEEQQQQQQQQQFFFFFFFFFFFTTTTTTTAAAAAMMMMMMMMFFFFFFFFFFFRRRRRRRRRRRRRRRRRRRRRRKKKKKKKKKAAAAAFFFFFFFFFFFLLLLLLLLHHHHHHHHHHWWWWWWWWWWWWWWYYYYYYYYYYYYTTTTTTTGGGGEEEEEEEEEGGGGMMMMMMMMDDDDDDDDEEEEEEEEEMMMMMMMMEEEEEEEEEFFFFFFFFFFFTTTTTTTEEEEEEEEEAAAAAEEEEEEEEESSSSSSNNNNNNNNMMMMMMMMNNNNNNNNDDDDDDDDLLLLLLLLVVVVVVVAAAAAEEEEEEEEEYYYYYYYYYYYYQQQQQQQQQQQQQQQQQQYYYYYYYYYYYYQQQQQQQQQDDDDDDDDAAAAATTTTTTTAAAAADDDDDDDDEEEEEEEEEEEEEEEEEEGGGGEEEEEEEEEYYYYYYYYYYYYDDDDDDDDVVVVVVVEEEEEEEEEEEEEEEEEEEEEEEEEEEEEEEEEEEEEEEEEEEEEGGGGDDDDDDDDYYYYYYYYYYYYEEEEEEEEETTTTTTTT

SEQ ID NO: 183 - protein, 3505 aa, Gallus gallus
MMMMMMMMRRRRRRRRRRREEEEEEEEEIIIIIIIIVVVVVVVHHHHHHHHHHIIIIIIIIQQQQQQQQQAAAAAGGGGQQQQQQQQQCCCCCCGGGGNNNNNNNNQQQQQQQQQIIIIIIIIGGGGTTTTTTTKKKKKKKKKFFFFFFFFFFFWWWWWWWWWWWWWWEEEEEEEEEVVVVVVVIIIIIIIISSSSSSDDDDDDDDEEEEEEEEEHHHHHHHHHHGGGGIIIIIIIIDDDDDDDDPPPPPPPAAAAAGGGGGGGGYYYYYYYYYYYYVVVVVVVGGGGDDDDDDDDSSSSSSAAAAALLLLLLLLQQQQQQQQQLLLLLLLLEEEEEEEEERRRRRRRRRRRIIIIIIIINNNNNNNNVVVVVVVYYYYYYYYYYYYYYYYYYYYYYYYNNNNNNNNEEEEEEEEESSSSSSSSSSSSSSSSSSQQQQQQQQQKKKKKKKKKYYYYYYYYYYYYVVVVVVVPPPPPPPRRRRRRRRRRRAAAAAVVVVVVVLLLLLLLLVVVVVVVDDDDDDDDLLLLLLLLEEEEEEEEEPPPPPPPGGGGTTTTTTTMMMMMMMMDDDDDDDDSSSSSSVVVVVVVRRRRRRRRRRRSSSSSSGGGGPPPPPPPFFFFFFFFFFFGGGGQQQQQQQQQLLLLLLLLFFFFFFFFFFFRRRRRRRRRRRPPPPPPPDDDDDDDDNNNNNNNNFFFFFFFFFFFIIIIIIIIFFFFFFFFFFFGGGGQQQQQQQQQTTTTTTTGGGGAAAAAGGGGNNNNNNNNNNNNNNNNWWWWWWWWWWWWWWAAAAAKKKKKKKKKGGGGHHHHHHHHHHYYYYYYYYYYYYTTTTTTTEEEEEEEEEGGGGAAAAAEEEEEEEEELLLLLLLLVVVVVVVDDDDDDDDSSSSSSVVVVVVVLLLLLLLLDDDDDDDDVVVVVVVVVVVVVVRRRRRRRRRRRKKKKKKKKKEEEEEEEEECCCCCCEEEEEEEEEHHHHHHHHHHCCCCCCDDDDDDDDCCCCCCLLLLLLLLQQQQQQQQQGGGGFFFFFFFFFFFQQQQQQQQQLLLLLLLLTTTTTTTHHHHHHHHHHSSSSSSLLLLLLLLGGGGGGGGGGGGTTTTTTTGGGGSSSSSSGGGGMMMMMMMMGGGGTTTTTTTLLLLLLLLLLLLLLLLIIIIIIIISSSSSSKKKKKKKKKIIIIIIIIRRRRRRRRRRREEEEEEEEEEEEEEEEEEYYYYYYYYYYYYPPPPPPPDDDDDDDDRRRRRRRRRRRIIIIIIIIMMMMMMMMNNNNNNNNTTTTTTTFFFFFFFFFFFSSSSSSVVVVVVVMMMMMMMMPPPPPPPSSSSSSPPPPPPPKKKKKKKKKVVVVVVVSSSSSSDDDDDDDDTTTTTTTVVVVVVVVVVVVVVEEEEEEEEEPPPPPPPYYYYYYYYYYYYNNNNNNNNAAAAATTTTTTTLLLLLLLLSSSSSSVVVVVVVHHHHHHHHHHQQQQQQQQQLLLLLLLLVVVVVVVEEEEEEEEENNNNNNNNTTTTTTTDDDDDDDDEEEEEEEEETTTTTTTYYYYYYYYYYYYCCCCCCIIIIIIIIDDDDDDDDNNNNNNNNEEEEEEEEEAAAAALLLLLLLLYYYYYYYYYYYYDDDDDDDDIIIIIIIICCCCCCFFFFFFFFFFFRRRRRRRRRRRTTTTTTTLLLLLLLLKKKKKKKKKLLLLLLLLTTTTTTTTTTTTTTPPPPPPPTTTTTTTYYYYYYYYYYYYGGGGDDDDDDDDLLLLLLLLNNNNNNNNHHHHHHHHHHLLLLLLLLVVVVVVVSSSSSSAAAAATTTTTTTMMMMMMMMSSSSSSGGGGVVVVVVVTTTTTTTTTTTTTTSSSSSSLLLLLLLLRRRRRRRRRRRFFFFFFFFFFFPPPPPPPGGGGQQQQQQQQQLLLLLLLLNNNNNNNNAAAAADDDDDDDDLLLLLLLLRRRRRRRRRRRKKKKKKKKKLLLLLLLLAAAAAVVVVVVVNNNNNNNNMMMMMMMMVVVVVVVPPPPPPPFFFFFFFFFFFPPPPPPPRRRRRRRRRRRLLLLLLLLHHHHHHHHHHFFFFFFFFFFFFFFFFFFFFFFMMMMMMMMPPPPPPPGGGGFFFFFFFFFFFAAAAAPPPPPPPLLLLLLLLTTTTTTTAAAAARRRRRRRRRRRGGGGSSSSSSQQQQQQQQQQQQQQQQQQYYYYYYYYYYYYRRRRRRRRRRRAAAAALLLLLLLLTTTTTTTVVVVVVVPPPPPPPEEEEEEEEELLLLLLLLTTTTTTTQQQQQQQQQQQQQQQQQQMMMMMMMMFFFFFFFFFFFDDDDDDDDAAAAAKKKKKKKKKNNNNNNNNMMMMMMMMMMMMMMMMAAAAAAAAAACCCCCCDDDDDDDDPPPPPPPRRRRRRRRRRRHHHHHHHHHHGGGGRRRRRRRRRRRYYYYYYYYYYYYLLLLLLLLTTTTTTTVVVVVVVAAAAATTTTTTTVVVVVVVFFFFFFFFFFFRRRRRRRRRRRGGGGPPPPPPPMMMMMMMMSSSSSSMMMMMMMMKKKKKKKKKEEEEEEEEEVVVVVVVDDDDDDDDEEEEEEEEEQQQQQQQQQMMMMMMMMLLLLLLLLAAAAAIIIIIIIIQQQQQQQQQNNNNNNNNKKKKKKKKKNNNNNNNNSSSSSSSSSSSSYYYYYYYYYYYYFFFFFFFFFFFVVVVVVVEEEEEEEEEWWWWWWWWWWWWWWIIIIIIIIPPPPPPPNNNNNNNNNNNNNNNNVVVVVVVKKKKKKKKKVVVVVVVAAAAAVVVVVVVCCCCCCDDDDDDDDIIIIIIIIPPPPPPPPPPPPPPRRRRRRRRRRRGGGGLLLLLLLLKKKKKKKKKMMMMMMMMAAAAASSSSSSTTTTTTTFFFFFFFFFFFIIIIIIIIGGGGNNNNNNNNSSSSSSTTTTTTTAAAAAIIIIIIIIQQQQQQQQQEEEEEEEEELLLLLLLLFFFFFFFFFFFKKKKKKKKKRRRRRRRRRRRIIIIIIIISSSSSSEEEEEEEEEQQQQQQQQQFFFFFFFFFFFSSSSSSAAAAAMMMMMMMMFFFFFFFFFFFRRRRRRRRRRRRRRRRRRRRRRKKKKKKKKKAAAAAFFFFFFFFFFFLLLLLLLLHHHHHHHHHHWWWWWWWWWWWWWWFFFFFFFFFFFTTTTTTTGGGGEEEEEEEEEGGGGMMMMMMMMDDDDDDDDEEEEEEEEEMMMMMMMMEEEEEEEEEFFFFFFFFFFFTTTTTTTEEEEEEEEEAAAAAEEEEEEEEESSSSSSNNNNNNNNMMMMMMMMNNNNNNNNDDDDDDDDLLLLLLLLVVVVVVVSSSSSSEEEEEEEEEYYYYYYYYYYYYQQQQQQQQQQQQQQQQQQYYYYYYYYYYYYQQQQQQQQQEEEEEEEEEAAAAATTTTTTTAAAAANNNNNNNNDDDDDDDDGGGGEEEEEEEEEEEEEEEEEEAAAAAFFFFFFFFFFFEEEEEEEEEDDDDDDDDDDDDDDDDEEEEEEEEEEEEEEEEEEEEEEEEEEEIIIIIIIINNNNNNNNEEEEEEEEEE

SEQ ID NO: 184 - protein, 3502 aa, Ectocarpus variabilis
MMMMMMMMRRRRRRRRRRREEEEEEEEEIIIIIIIIVVVVVVVHHHHHHHHHHVVVVVVVQQQQQQQQQAAAAAGGGGQQQQQQQQQCCCCCCGGGGNNNNNNNNQQQQQQQQQIIIIIIIIGGGGSSSSSSKKKKKKKKKFFFFFFFFFFFWWWWWWWWWWWWWWEEEEEEEEEVVVVVVVIIIIIIIISSSSSSDDDDDDDDEEEEEEEEEHHHHHHHHHHGGGGIIIIIIIIDDDDDDDDPPPPPPPTTTTTTTGGGGSSSSSSYYYYYYYYYYYYHHHHHHHHHHGGGGDDDDDDDDSSSSSSDDDDDDDDLLLLLLLLQQQQQQQQQLLLLLLLLEEEEEEEEERRRRRRRRRRRIIIIIIIINNNNNNNNCCCCCCYYYYYYYYYYYYFFFFFFFFFFFNNNNNNNNEEEEEEEEEAAAAATTTTTTTGGGGGGGGRRRRRRRRRRRYYYYYYYYYYYYVVVVVVVPPPPPPPRRRRRRRRRRRAAAAAIIIIIIIILLLLLLLLMMMMMMMMDDDDDDDDLLLLLLLLEEEEEEEEEPPPPPPPGGGGTTTTTTTMMMMMMMMDDDDDDDDSSSSSSVVVVVVVRRRRRRRRRRRAAAAAGGGGPPPPPPPFFFFFFFFFFFGGGGQQQQQQQQQLLLLLLLLFFFFFFFFFFFRRRRRRRRRRRPPPPPPPDDDDDDDDNNNNNNNNFFFFFFFFFFFVVVVVVVFFFFFFFFFFFGGGGQQQQQQQQQTTTTTTTGGGGAAAAAGGGGNNNNNNNNNNNNNNNNWWWWWWWWWWWWWWAAAAAKKKKKKKKKGGGGHHHHHHHHHHYYYYYYYYYYYYTTTTTTTEEEEEEEEEGGGGAAAAAEEEEEEEEELLLLLLLLIIIIIIIIDDDDDDDDSSSSSSVVVVVVVLLLLLLLLDDDDDDDDVVVVVVVVVVVVVVRRRRRRRRRRRKKKKKKKKKEEEEEEEEEAAAAAEEEEEEEEESSSSSSCCCCCCDDDDDDDDAAAAALLLLLLLLQQQQQQQQQGGGGFFFFFFFFFFFQQQQQQQQQLLLLLLLLTTTTTTTHHHHHHHHHHSSSSSSMMMMMMMMGGGGGGGGGGGGTTTTTTTGGGGAAAAAGGGGMMMMMMMMGGGGTTTTTTTLLLLLLLLLLLLLLLLIIIIIIIISSSSSSKKKKKKKKKVVVVVVVRRRRRRRRRRREEEEEEEEEEEEEEEEEEYYYYYYYYYYYYPPPPPPPDDDDDDDDRRRRRRRRRRRVVVVVVVMMMMMMMMSSSSSSTTTTTTTYYYYYYYYYYYYSSSSSSVVVVVVVIIIIIIIIPPPPPPPSSSSSSPPPPPPPKKKKKKKKKVVVVVVVSSSSSSDDDDDDDDTTTTTTTVVVVVVVVVVVVVVEEEEEEEEEPPPPPPPYYYYYYYYYYYYNNNNNNNNAAAAATTTTTTTLLLLLLLLSSSSSSVVVVVVVHHHHHHHHHHQQQQQQQQQLLLLLLLLVVVVVVVEEEEEEEEENNNNNNNNAAAAADDDDDDDDQQQQQQQQQCCCCCCFFFFFFFFFFFTTTTTTTLLLLLLLLDDDDDDDDNNNNNNNNEEEEEEEEEAAAAALLLLLLLLYYYYYYYYYYYYDDDDDDDDIIIIIIIICCCCCCFFFFFFFFFFFRRRRRRRRRRRTTTTTTTLLLLLLLLKKKKKKKKKLLLLLLLLTTTTTTTTTTTTTTPPPPPPPTTTTTTTYYYYYYYYYYYYGGGGDDDDDDDDLLLLLLLLNNNNNNNNHHHHHHHHHHLLLLLLLLVVVVVVVSSSSSSAAAAAAAAAAIIIIIIIICCCCCCGGGGTTTTTTTTTTTTTTCCCCCCSSSSSSLLLLLLLLRRRRRRRRRRRFFFFFFFFFFFPPPPPPPGGGGQQQQQQQQQLLLLLLLLNNNNNNNNCCCCCCDDDDDDDDLLLLLLLLRRRRRRRRRRRKKKKKKKKKLLLLLLLLAAAAAVVVVVVVNNNNNNNNMMMMMMMMVVVVVVVPPPPPPPFFFFFFFFFFFPPPPPPPRRRRRRRRRRRLLLLLLLLHHHHHHHHHHFFFFFFFFFFFFFFFFFFFFFFMMMMMMMMIIIIIIIIGGGGFFFFFFFFFFFAAAAAPPPPPPPLLLLLLLLTTTTTTTSSSSSSRRRRRRRRRRRGGGGSSSSSSQQQQQQQQQQQQQQQQQQYYYYYYYYYYYYRRRRRRRRRRRAAAAALLLLLLLLTTTTTTTVVVVVVVPPPPPPPEEEEEEEEELLLLLLLLTTTTTTTQQQQQQQQQQQQQQQQQQCCCCCCFFFFFFFFFFFDDDDDDDDSSSSSSKKKKKKKKKNNNNNNNNMMMMMMMMMMMMMMMMCCCCCCAAAAAAAAAADDDDDDDDPPPPPPPRRRRRRRRRRRHHHHHHHHHHGGGGRRRRRRRRRRRYYYYYYYYYYYYLLLLLLLLTTTTTTTCCCCCCAAAAAVVVVVVVMMMMMMMMFFFFFFFFFFFRRRRRRRRRRRGGGGRRRRRRRRRRRMMMMMMMMSSSSSSTTTTTTTKKKKKKKKKEEEEEEEEEVVVVVVVDDDDDDDDEEEEEEEEEQQQQQQQQQMMMMMMMMLLLLLLLLNNNNNNNNVVVVVVVVVVVVVVNNNNNNNNKKKKKKKKKNNNNNNNNSSSSSSSSSSSSYYYYYYYYYYYYFFFFFFFFFFFVVVVVVVEEEEEEEEEWWWWWWWWWWWWWWIIIIIIIIPPPPPPPNNNNNNNNNNNNNNNNVVVVVVVKKKKKKKKKAAAAASSSSSSIIIIIIIICCCCCCDDDDDDDDIIIIIIIIPPPPPPPPPPPPPPKKKKKKKKKGGGGLLLLLLLLKKKKKKKKKMMMMMMMMSSSSSSTTTTTTTTTTTTTTFFFFFFFFFFFVVVVVVVGGGGNNNNNNNNTTTTTTTTTTTTTTAAAAAIIIIIIIIQQQQQQQQQEEEEEEEEEVVVVVVVWWWWWWWWWWWWWWKKKKKKKKKRRRRRRRRRRRVVVVVVVAAAAAEEEEEEEEEQQQQQQQQQFFFFFFFFFFFTTTTTTTSSSSSSMMMMMMMMFFFFFFFFFFFRRRRRRRRRRRRRRRRRRRRRRKKKKKKKKKAAAAAFFFFFFFFFFFLLLLLLLLHHHHHHHHHHWWWWWWWWWWWWWWYYYYYYYYYYYYTTTTTTTGGGGEEEEEEEEEGGGGMMMMMMMMDDDDDDDDEEEEEEEEEMMMMMMMMEEEEEEEEEFFFFFFFFFFFTTTTTTTEEEEEEEEEAAAAAEEEEEEEEESSSSSSNNNNNNNNMMMMMMMMNNNNNNNNDDDDDDDDLLLLLLLLVVVVVVVSSSSSSEEEEEEEEEYYYYYYYYYYYYQQQQQQQQQQQQQQQQQQYYYYYYYYYYYYQQQQQQQQQDDDDDDDDAAAAATTTTTTTAAAAAEEEEEEEEEEEEEEEEEEEEEEEEEEEGGGGEEEEEEEEEFFFFFFFFFFFDDDDDDDDEEEEEEEEEDDDDDDDDEEEEEEEEEEEEEEEEEELLLLLLLLDDDDDDDDDDDDDDDDAAAAAMMMMMMMMGGGGG

SEQ ID NO: 185 - protein, 3481 aa, Homo sapiens
MMMMMMMMRRRRRRRRRRREEEEEEEEEIIIIIIIIVVVVVVVHHHHHHHHHHLLLLLLLLQQQQQQQQQAAAAAGGGGQQQQQQQQQCCCCCCGGGGNNNNNNNNQQQQQQQQQIIIIIIIIGGGGAAAAAKKKKKKKKKFFFFFFFFFFFWWWWWWWWWWWWWWEEEEEEEEEVVVVVVVIIIIIIIISSSSSSDDDDDDDDEEEEEEEEEHHHHHHHHHHGGGGIIIIIIIIDDDDDDDDPPPPPPPTTTTTTTGGGGTTTTTTTYYYYYYYYYYYYHHHHHHHHHHGGGGDDDDDDDDSSSSSSDDDDDDDDLLLLLLLLQQQQQQQQQLLLLLLLLEEEEEEEEERRRRRRRRRRRIIIIIIIINNNNNNNNVVVVVVVYYYYYYYYYYYYYYYYYYYYYYYYNNNNNNNNEEEEEEEEEAAAAATTTTTTTGGGGGGGGNNNNNNNNYYYYYYYYYYYYVVVVVVVPPPPPPPRRRRRRRRRRRAAAAAVVVVVVVLLLLLLLLVVVVVVVDDDDDDDDLLLLLLLLEEEEEEEEEPPPPPPPGGGGTTTTTTTMMMMMMMMDDDDDDDDSSSSSSVVVVVVVRRRRRRRRRRRSSSSSSGGGGPPPPPPPFFFFFFFFFFFGGGGQQQQQQQQQIIIIIIIIFFFFFFFFFFFRRRRRRRRRRRPPPPPPPDDDDDDDDNNNNNNNNFFFFFFFFFFFVVVVVVVFFFFFFFFFFFGGGGQQQQQQQQQSSSSSSGGGGAAAAAGGGGNNNNNNNNNNNNNNNNWWWWWWWWWWWWWWAAAAAKKKKKKKKKGGGGHHHHHHHHHHYYYYYYYYYYYYTTTTTTTEEEEEEEEEGGGGAAAAAEEEEEEEEELLLLLLLLVVVVVVVDDDDDDDDAAAAAVVVVVVVLLLLLLLLDDDDDDDDVVVVVVVVVVVVVVRRRRRRRRRRRKKKKKKKKKEEEEEEEEEAAAAAEEEEEEEEESSSSSSCCCCCCDDDDDDDDCCCCCCLLLLLLLLQQQQQQQQQGGGGFFFFFFFFFFFQQQQQQQQQLLLLLLLLTTTTTTTHHHHHHHHHHSSSSSSLLLLLLLLGGGGGGGGGGGGTTTTTTTGGGGSSSSSSGGGGMMMMMMMMGGGGTTTTTTTLLLLLLLLLLLLLLLLIIIIIIIISSSSSSKKKKKKKKKMMMMMMMMRRRRRRRRRRREEEEEEEEEEEEEEEEEEFFFFFFFFFFFPPPPPPPDDDDDDDDRRRRRRRRRRRIIIIIIIIMMMMMMMMNNNNNNNNTTTTTTTFFFFFFFFFFFSSSSSSVVVVVVVVVVVVVVPPPPPPPSSSSSSPPPPPPPKKKKKKKKKVVVVVVVSSSSSSDDDDDDDDTTTTTTTVVVVVVVVVVVVVVEEEEEEEEEPPPPPPPYYYYYYYYYYYYNNNNNNNNAAAAATTTTTTTLLLLLLLLSSSSSSVVVVVVVHHHHHHHHHHQQQQQQQQQLLLLLLLLVVVVVVVEEEEEEEEENNNNNNNNTTTTTTTDDDDDDDDEEEEEEEEETTTTTTTYYYYYYYYYYYYCCCCCCIIIIIIIIDDDDDDDDNNNNNNNNEEEEEEEEEAAAAALLLLLLLLYYYYYYYYYYYYDDDDDDDDIIIIIIIICCCCCCFFFFFFFFFFFRRRRRRRRRRRTTTTTTTLLLLLLLLKKKKKKKKKLLLLLLLLTTTTTTTTTTTTTTPPPPPPPTTTTTTTYYYYYYYYYYYYGGGGDDDDDDDDLLLLLLLLNNNNNNNNHHHHHHHHHHLLLLLLLLVVVVVVVSSSSSSAAAAATTTTTTTMMMMMMMMSSSSSSGGGGVVVVVVVTTTTTTTTTTTTTTCCCCCCLLLLLLLLRRRRRRRRRRRFFFFFFFFFFFPPPPPPPGGGGQQQQQQQQQLLLLLLLLNNNNNNNNAAAAADDDDDDDDLLLLLLLLRRRRRRRRRRRKKKKKKKKKLLLLLLLLAAAAAVVVVVVVNNNNNNNNMMMMMMMMVVVVVVVPPPPPPPFFFFFFFFFFFPPPPPPPRRRRRRRRRRRLLLLLLLLHHHHHHHHHHFFFFFFFFFFFFFFFFFFFFFFMMMMMMMMPPPPPPPAAAAAFFFFFFFFFFFAAAAAPPPPPPPLLLLLLLLTTTTTTTSSSSSSRRRRRRRRRRRGGGGSSSSSSQQQQQQQQQQQQQQQQQQYYYYYYYYYYYYRRRRRRRRRRRGGGGLLLLLLLLTTTTTTTVVVVVVVPPPPPPPEEEEEEEEELLLLLLLLTTTTTTTQQQQQQQQQQQQQQQQQQMMMMMMMMFFFFFFFFFFFDDDDDDDDAAAAAKKKKKKKKKNNNNNNNNMMMMMMMMMMMMMMMMAAAAAAAAAACCCCCCDDDDDDDDPPPPPPPRRRRRRRRRRRHHHHHHHHHHGGGGRRRRRRRRRRRYYYYYYYYYYYYLLLLLLLLTTTTTTTVVVVVVVAAAAAAAAAAVVVVVVVFFFFFFFFFFFRRRRRRRRRRRGGGGRRRRRRRRRRRMMMMMMMMSSSSSSMMMMMMMMKKKKKKKKKEEEEEEEEEVVVVVVVDDDDDDDDEEEEEEEEEQQQQQQQQQMMMMMMMMLLLLLLLLSSSSSSVVVVVVVQQQQQQQQQSSSSSSKKKKKKKKKNNNNNNNNSSSSSSSSSSSSYYYYYYYYYYYYFFFFFFFFFFFVVVVVVVEEEEEEEEEWWWWWWWWWWWWWWIIIIIIIIPPPPPPPNNNNNNNNNNNNNNNNVVVVVVVKKKKKKKKKTTTTTTTAAAAAVVVVVVVCCCCCCDDDDDDDDIIIIIIIIPPPPPPPPPPPPPPRRRRRRRRRRRGGGGLLLLLLLLKKKKKKKKKMMMMMMMMAAAAAVVVVVVVTTTTTTTFFFFFFFFFFFIIIIIIIIGGGGNNNNNNNNSSSSSSTTTTTTTAAAAAIIIIIIIIQQQQQQQQQEEEEEEEEELLLLLLLLFFFFFFFFFFFKKKKKKKKKRRRRRRRRRRRIIIIIIIISSSSSSEEEEEEEEEQQQQQQQQQFFFFFFFFFFFTTTTTTTAAAAAMMMMMMMMFFFFFFFFFFFRRRRRRRRRRRRRRRRRRRRRRKKKKKKKKKAAAAAFFFFFFFFFFFLLLLLLLLHHHHHHHHHHWWWWWWWWWWWWWWYYYYYYYYYYYYTTTTTTTGGGGEEEEEEEEEGGGGMMMMMMMMDDDDDDDDEEEEEEEEEMMMMMMMMEEEEEEEEEFFFFFFFFFFFTTTTTTTEEEEEEEEEAAAAAEEEEEEEEESSSSSSNNNNNNNNMMMMMMMMNNNNNNNNDDDDDDDDLLLLLLLLVVVVVVVSSSSSSEEEEEEEEEYYYYYYYYYYYYQQQQQQQQQQQQQQQQQQYYYYYYYYYYYYQQQQQQQQQDDDDDDDDAAAAATTTTTTTAAAAAEEEEEEEEEQQQQQQQQQGGGGEEEEEEEEEFFFFFFFFFFFEEEEEEEEEEEEEEEEEEEEEEEEEEEAAAAAEEEEEEEEEEEEEEEEEEEEEEEEEEEVVVVVVVAAAAAA

SEQ ID NO: 186 - protein, 3502 aa, Zea mays
MMMMMMMMRRRRRRRRRRREEEEEEEEEIIIIIIIILLLLLLLLHHHHHHHHHHIIIIIIIIQQQQQQQQQGGGGGGGGQQQQQQQQQCCCCCCGGGGNNNNNNNNQQQQQQQQQIIIIIIIIGGGGSSSSSSKKKKKKKKKFFFFFFFFFFFWWWWWWWWWWWWWWEEEEEEEEEVVVVVVVVVVVVVVCCCCCCDDDDDDDDEEEEEEEEEHHHHHHHHHHGGGGIIIIIIIIDDDDDDDDPPPPPPPTTTTTTTGGGGRRRRRRRRRRRYYYYYYYYYYYYVVVVVVVGGGGTTTTTTTSSSSSSDDDDDDDDLLLLLLLLQQQQQQQQQLLLLLLLLEEEEEEEEERRRRRRRRRRRVVVVVVVNNNNNNNNVVVVVVVYYYYYYYYYYYYYYYYYYYYYYYYNNNNNNNNEEEEEEEEEAAAAASSSSSSCCCCCCGGGGRRRRRRRRRRRFFFFFFFFFFFVVVVVVVPPPPPPPRRRRRRRRRRRAAAAAVVVVVVVLLLLLLLLMMMMMMMMDDDDDDDDLLLLLLLLEEEEEEEEEPPPPPPPGGGGTTTTTTTMMMMMMMMDDDDDDDDSSSSSSVVVVVVVRRRRRRRRRRRTTTTTTTGGGGPPPPPPPYYYYYYYYYYYYGGGGQQQQQQQQQIIIIIIIIFFFFFFFFFFFRRRRRRRRRRRPPPPPPPDDDDDDDDNNNNNNNNFFFFFFFFFFFVVVVVVVFFFFFFFFFFFGGGGQQQQQQQQQSSSSSSGGGGAAAAAGGGGNNNNNNNNNNNNNNNNWWWWWWWWWWWWWWAAAAAKKKKKKKKKGGGGHHHHHHHHHHYYYYYYYYYYYYTTTTTTTEEEEEEEEEGGGGAAAAAEEEEEEEEELLLLLLLLIIIIIIIIDDDDDDDDSSSSSSVVVVVVVLLLLLLLLDDDDDDDDVVVVVVVVVVVVVVRRRRRRRRRRRKKKKKKKKKEEEEEEEEEAAAAAEEEEEEEEENNNNNNNNCCCCCCDDDDDDDDCCCCCCLLLLLLLLQQQQQQQQQGGGGFFFFFFFFFFFQQQQQQQQQVVVVVVVCCCCCCHHHHHHHHHHSSSSSSLLLLLLLLGGGGGGGGGGGGTTTTTTTGGGGSSSSSSGGGGMMMMMMMMGGGGTTTTTTTLLLLLLLLLLLLLLLLIIIIIIIISSSSSSKKKKKKKKKIIIIIIIIRRRRRRRRRRREEEEEEEEEEEEEEEEEEYYYYYYYYYYYYPPPPPPPDDDDDDDDRRRRRRRRRRRMMMMMMMMMMMMMMMMLLLLLLLLTTTTTTTFFFFFFFFFFFSSSSSSVVVVVVVFFFFFFFFFFFPPPPPPPSSSSSSPPPPPPPKKKKKKKKKVVVVVVVSSSSSSDDDDDDDDTTTTTTTVVVVVVVVVVVVVVEEEEEEEEEPPPPPPPYYYYYYYYYYYYNNNNNNNNAAAAATTTTTTTLLLLLLLLSSSSSSVVVVVVVHHHHHHHHHHQQQQQQQQQLLLLLLLLVVVVVVVEEEEEEEEENNNNNNNNAAAAADDDDDDDDEEEEEEEEECCCCCCMMMMMMMMVVVVVVVLLLLLLLLDDDDDDDDNNNNNNNNEEEEEEEEEAAAAALLLLLLLLYYYYYYYYYYYYDDDDDDDDIIIIIIIICCCCCCFFFFFFFFFFFRRRRRRRRRRRTTTTTTTLLLLLLLLKKKKKKKKKLLLLLLLLTTTTTTTTTTTTTTPPPPPPPSSSSSSFFFFFFFFFFFGGGGDDDDDDDDLLLLLLLLNNNNNNNNHHHHHHHHHHLLLLLLLLIIIIIIIISSSSSSAAAAATTTTTTTMMMMMMMMSSSSSSGGGGVVVVVVVTTTTTTTCCCCCCCCCCCCLLLLLLLLRRRRRRRRRRRFFFFFFFFFFFPPPPPPPGGGGQQQQQQQQQLLLLLLLLNNNNNNNNSSSSSSDDDDDDDDLLLLLLLLRRRRRRRRRRRKKKKKKKKKLLLLLLLLAAAAAVVVVVVVNNNNNNNNLLLLLLLLIIIIIIIIPPPPPPPFFFFFFFFFFFPPPPPPPRRRRRRRRRRRLLLLLLLLHHHHHHHHHHFFFFFFFFFFFFFFFFFFFFFFMMMMMMMMVVVVVVVGGGGFFFFFFFFFFFAAAAAPPPPPPPLLLLLLLLTTTTTTTSSSSSSRRRRRRRRRRRGGGGSSSSSSQQQQQQQQQQQQQQQQQQYYYYYYYYYYYYRRRRRRRRRRRAAAAALLLLLLLLTTTTTTTVVVVVVVPPPPPPPEEEEEEEEELLLLLLLLTTTTTTTQQQQQQQQQQQQQQQQQQMMMMMMMMWWWWWWWWWWWWWWDDDDDDDDAAAAAKKKKKKKKKNNNNNNNNMMMMMMMMMMMMMMMMCCCCCCAAAAAAAAAADDDDDDDDPPPPPPPRRRRRRRRRRRHHHHHHHHHHGGGGRRRRRRRRRRRYYYYYYYYYYYYLLLLLLLLTTTTTTTAAAAASSSSSSAAAAAMMMMMMMMFFFFFFFFFFFRRRRRRRRRRRGGGGKKKKKKKKKMMMMMMMMSSSSSSTTTTTTTKKKKKKKKKEEEEEEEEEVVVVVVVDDDDDDDDEEEEEEEEEQQQQQQQQQMMMMMMMMIIIIIIIINNNNNNNNVVVVVVVQQQQQQQQQNNNNNNNNKKKKKKKKKNNNNNNNNSSSSSSSSSSSSYYYYYYYYYYYYFFFFFFFFFFFVVVVVVVEEEEEEEEEWWWWWWWWWWWWWWIIIIIIIIPPPPPPPNNNNNNNNNNNNNNNNVVVVVVVKKKKKKKKKSSSSSSSSSSSSVVVVVVVCCCCCCDDDDDDDDIIIIIIIIPPPPPPPPPPPPPPRRRRRRRRRRRGGGGLLLLLLLLSSSSSSMMMMMMMMAAAAASSSSSSTTTTTTTFFFFFFFFFFFIIIIIIIIGGGGNNNNNNNNSSSSSSTTTTTTTSSSSSSIIIIIIIIQQQQQQQQQEEEEEEEEEMMMMMMMMFFFFFFFFFFFRRRRRRRRRRRRRRRRRRRRRRVVVVVVVSSSSSSEEEEEEEEEQQQQQQQQQFFFFFFFFFFFTTTTTTTAAAAAMMMMMMMMFFFFFFFFFFFRRRRRRRRRRRRRRRRRRRRRRKKKKKKKKKAAAAAFFFFFFFFFFFLLLLLLLLHHHHHHHHHHWWWWWWWWWWWWWWYYYYYYYYYYYYTTTTTTTGGGGEEEEEEEEEGGGGMMMMMMMMDDDDDDDDEEEEEEEEEMMMMMMMMEEEEEEEEEFFFFFFFFFFFTTTTTTTEEEEEEEEEAAAAAEEEEEEEEESSSSSSNNNNNNNNMMMMMMMMNNNNNNNNDDDDDDDDLLLLLLLLVVVVVVVSSSSSSEEEEEEEEEYYYYYYYYYYYYQQQQQQQQQQQQQQQQQQYYYYYYYYYYYYQQQQQQQQQDDDDDDDDAAAAATTTTTTTAAAAADDDDDDDDEEEEEEEEEEEEEEEEEEAAAAAEEEEEEEEEYYYYYYYYYYYYEEEEEEEEEDDDDDDDDEEEEEEEEEEEEEEEEEEAAAAAIIIIIIIIQQQQQQQQQDDDDDDDDEEEEEEEEEE

SEQ ID NO: 187 - protein, 3519 aa, Triticum aestivum
MMMMMMMMRRRRRRRRRRREEEEEEEEEIIIIIIIILLLLLLLLHHHHHHHHHHIIIIIIIIQQQQQQQQQGGGGGGGGQQQQQQQQQCCCCCCGGGGNNNNNNNNQQQQQQQQQIIIIIIIIGGGGSSSSSSKKKKKKKKKFFFFFFFFFFFWWWWWWWWWWWWWWEEEEEEEEEVVVVVVVVVVVVVVCCCCCCDDDDDDDDEEEEEEEEEHHHHHHHHHHGGGGIIIIIIIIDDDDDDDDPPPPPPPTTTTTTTGGGGRRRRRRRRRRRYYYYYYYYYYYYVVVVVVVGGGGTTTTTTTSSSSSSDDDDDDDDLLLLLLLLQQQQQQQQQLLLLLLLLEEEEEEEEERRRRRRRRRRRVVVVVVVNNNNNNNNVVVVVVVYYYYYYYYYYYYYYYYYYYYYYYYNNNNNNNNEEEEEEEEEAAAAASSSSSSCCCCCCGGGGRRRRRRRRRRRFFFFFFFFFFFVVVVVVVPPPPPPPRRRRRRRRRRRAAAAAVVVVVVVLLLLLLLLMMMMMMMMDDDDDDDDLLLLLLLLEEEEEEEEEPPPPPPPGGGGTTTTTTTMMMMMMMMDDDDDDDDSSSSSSVVVVVVVRRRRRRRRRRRTTTTTTTGGGGPPPPPPPYYYYYYYYYYYYGGGGQQQQQQQQQIIIIIIIIFFFFFFFFFFFRRRRRRRRRRRPPPPPPPDDDDDDDDNNNNNNNNFFFFFFFFFFFVVVVVVVFFFFFFFFFFFGGGGQQQQQQQQQSSSSSSGGGGAAAAAGGGGNNNNNNNNNNNNNNNNWWWWWWWWWWWWWWAAAAAKKKKKKKKKGGGGHHHHHHHHHHYYYYYYYYYYYYTTTTTTTEEEEEEEEEGGGGAAAAAEEEEEEEEELLLLLLLLIIIIIIIIDDDDDDDDSSSSSSVVVVVVVLLLLLLLLDDDDDDDDVVVVVVVVVVVVVVRRRRRRRRRRRKKKKKKKKKEEEEEEEEEAAAAAEEEEEEEEENNNNNNNNCCCCCCDDDDDDDDCCCCCCLLLLLLLLQQQQQQQQQGGGGFFFFFFFFFFFQQQQQQQQQVVVVVVVCCCCCCHHHHHHHHHHSSSSSSLLLLLLLLGGGGGGGGGGGGTTTTTTTGGGGSSSSSSGGGGMMMMMMMMGGGGTTTTTTTLLLLLLLLLLLLLLLLIIIIIIIISSSSSSKKKKKKKKKIIIIIIIIRRRRRRRRRRREEEEEEEEEEEEEEEEEEYYYYYYYYYYYYPPPPPPPDDDDDDDDRRRRRRRRRRRMMMMMMMMMMMMMMMMLLLLLLLLTTTTTTTFFFFFFFFFFFSSSSSSVVVVVVVFFFFFFFFFFFPPPPPPPSSSSSSPPPPPPPKKKKKKKKKVVVVVVVSSSSSSDDDDDDDDTTTTTTTVVVVVVVVVVVVVVEEEEEEEEEPPPPPPPYYYYYYYYYYYYNNNNNNNNAAAAATTTTTTTLLLLLLLLSSSSSSVVVVVVVHHHHHHHHHHQQQQQQQQQLLLLLLLLVVVVVVVEEEEEEEEENNNNNNNNAAAAADDDDDDDDEEEEEEEEECCCCCCMMMMMMMMVVVVVVVLLLLLLLLDDDDDDDDNNNNNNNNEEEEEEEEEAAAAALLLLLLLLYYYYYYYYYYYYDDDDDDDDIIIIIIIICCCCCCFFFFFFFFFFFRRRRRRRRRRRTTTTTTTLLLLLLLLKKKKKKKKKLLLLLLLLTTTTTTTTTTTTTTPPPPPPPSSSSSSFFFFFFFFFFFGGGGDDDDDDDDLLLLLLLLNNNNNNNNHHHHHHHHHHLLLLLLLLIIIIIIIISSSSSSAAAAATTTTTTTMMMMMMMMSSSSSSGGGGVVVVVVVTTTTTTTCCCCCCCCCCCCLLLLLLLLRRRRRRRRRRRFFFFFFFFFFFPPPPPPPGGGGQQQQQQQQQLLLLLLLLNNNNNNNNSSSSSSDDDDDDDDLLLLLLLLRRRRRRRRRRRKKKKKKKKKLLLLLLLLAAAAAVVVVVVVNNNNNNNNLLLLLLLLIIIIIIIIPPPPPPPFFFFFFFFFFFPPPPPPPRRRRRRRRRRRLLLLLLLLHHHHHHHHHHFFFFFFFFFFFFFFFFFFFFFFMMMMMMMMVVVVVVVGGGGFFFFFFFFFFFAAAAAPPPPPPPLLLLLLLLTTTTTTTSSSSSSRRRRRRRRRRRGGGGSSSSSSQQQQQQQQQMMMMMMMMYYYYYYYYYYYYRRRRRRRRRRRSSSSSSLLLLLLLLTTTTTTTVVVVVVVPPPPPPPEEEEEEEEELLLLLLLLTTTTTTTQQQQQQQQQQQQQQQQQQMMMMMMMMWWWWWWWWWWWWWWDDDDDDDDSSSSSSKKKKKKKKKNNNNNNNNMMMMMMMMMMMMMMMMCCCCCCAAAAAAAAAADDDDDDDDPPPPPPPRRRRRRRRRRRHHHHHHHHHHGGGGRRRRRRRRRRRYYYYYYYYYYYYLLLLLLLLTTTTTTTAAAAASSSSSSAAAAAMMMMMMMMFFFFFFFFFFFRRRRRRRRRRRGGGGKKKKKKKKKMMMMMMMMSSSSSSTTTTTTTKKKKKKKKKEEEEEEEEEVVVVVVVDDDDDDDDEEEEEEEEEQQQQQQQQQMMMMMMMMIIIIIIIINNNNNNNNVVVVVVVQQQQQQQQQNNNNNNNNKKKKKKKKKNNNNNNNNSSSSSSSSSSSSYYYYYYYYYYYYFFFFFFFFFFFVVVVVVVEEEEEEEEEWWWWWWWWWWWWWWIIIIIIIIPPPPPPPNNNNNNNNNNNNNNNNVVVVVVVKKKKKKKKKSSSSSSSSSSSSVVVVVVVCCCCCCDDDDDDDDIIIIIIIIAAAAAPPPPPPPRRRRRRRRRRRGGGGLLLLLLLLSSSSSSMMMMMMMMAAAAASSSSSSTTTTTTTFFFFFFFFFFFIIIIIIIIGGGGNNNNNNNNSSSSSSTTTTTTTSSSSSSIIIIIIIIQQQQQQQQQEEEEEEEEEMMMMMMMMFFFFFFFFFFFRRRRRRRRRRRRRRRRRRRRRRVVVVVVVSSSSSSEEEEEEEEEQQQQQQQQQFFFFFFFFFFFTTTTTTTAAAAAMMMMMMMMFFFFFFFFFFFRRRRRRRRRRRRRRRRRRRRRRKKKKKKKKKAAAAAFFFFFFFFFFFLLLLLLLLHHHHHHHHHHWWWWWWWWWWWWWWYYYYYYYYYYYYTTTTTTTGGGGEEEEEEEEEGGGGMMMMMMMMDDDDDDDDEEEEEEEEEMMMMMMMMEEEEEEEEEFFFFFFFFFFFTTTTTTTEEEEEEEEEAAAAAEEEEEEEEESSSSSSNNNNNNNNMMMMMMMMNNNNNNNNDDDDDDDDLLLLLLLLVVVVVVVAAAAAEEEEEEEEEYYYYYYYYYYYYQQQQQQQQQQQQQQQQQQYYYYYYYYYYYYQQQQQQQQQDDDDDDDDAAAAATTTTTTTAAAAADDDDDDDDEEEEEEEEEEEEEEEEEEEEEEEEEEEEEEEEEEEELLLLLLLLYYYYYYYYYYYYEEEEEEEEEDDDDDDDDEEEEEEEEEDDDDDDDDDDDDDDDDAAAAADDDDDDDDLLLLLLLLQQQQQQQQQEEEEEEEEEE

SEQ ID NO: 188 - protein, 3540 aa, Arabidopsis thaliana
MMMMMMMMRRRRRRRRRRREEEEEEEEEIIIIIIIILLLLLLLLHHHHHHHHHHIIIIIIIIQQQQQQQQQGGGGGGGGQQQQQQQQQCCCCCCGGGGNNNNNNNNQQQQQQQQQIIIIIIIIGGGGSSSSSSKKKKKKKKKFFFFFFFFFFFWWWWWWWWWWWWWWEEEEEEEEEVVVVVVVVVVVVVVCCCCCCDDDDDDDDEEEEEEEEEHHHHHHHHHHGGGGIIIIIIIIDDDDDDDDPPPPPPPTTTTTTTGGGGRRRRRRRRRRRYYYYYYYYYYYYVVVVVVVGGGGNNNNNNNNSSSSSSDDDDDDDDLLLLLLLLQQQQQQQQQLLLLLLLLEEEEEEEEERRRRRRRRRRRVVVVVVVNNNNNNNNVVVVVVVYYYYYYYYYYYYYYYYYYYYYYYYNNNNNNNNEEEEEEEEEAAAAASSSSSSCCCCCCGGGGRRRRRRRRRRRYYYYYYYYYYYYVVVVVVVPPPPPPPRRRRRRRRRRRAAAAAIIIIIIIILLLLLLLLMMMMMMMMDDDDDDDDLLLLLLLLEEEEEEEEEPPPPPPPGGGGTTTTTTTMMMMMMMMDDDDDDDDSSSSSSVVVVVVVRRRRRRRRRRRTTTTTTTGGGGPPPPPPPYYYYYYYYYYYYGGGGQQQQQQQQQIIIIIIIIFFFFFFFFFFFRRRRRRRRRRRPPPPPPPDDDDDDDDNNNNNNNNFFFFFFFFFFFVVVVVVVFFFFFFFFFFFGGGGQQQQQQQQQSSSSSSGGGGAAAAAGGGGNNNNNNNNNNNNNNNNWWWWWWWWWWWWWWAAAAAKKKKKKKKKGGGGHHHHHHHHHHYYYYYYYYYYYYTTTTTTTEEEEEEEEEGGGGAAAAAEEEEEEEEELLLLLLLLIIIIIIIIDDDDDDDDAAAAAVVVVVVVLLLLLLLLDDDDDDDDVVVVVVVVVVVVVVRRRRRRRRRRRKKKKKKKKKEEEEEEEEEAAAAAEEEEEEEEENNNNNNNNCCCCCCDDDDDDDDCCCCCCLLLLLLLLQQQQQQQQQGGGGFFFFFFFFFFFQQQQQQQQQVVVVVVVCCCCCCHHHHHHHHHHSSSSSSLLLLLLLLGGGGGGGGGGGGTTTTTTTGGGGSSSSSSGGGGMMMMMMMMGGGGTTTTTTTLLLLLLLLLLLLLLLLIIIIIIIISSSSSSKKKKKKKKKIIIIIIIIRRRRRRRRRRREEEEEEEEEEEEEEEEEEYYYYYYYYYYYYPPPPPPPDDDDDDDDRRRRRRRRRRRMMMMMMMMMMMMMMMMLLLLLLLLTTTTTTTFFFFFFFFFFFSSSSSSVVVVVVVFFFFFFFFFFFPPPPPPPSSSSSSPPPPPPPKKKKKKKKKVVVVVVVSSSSSSDDDDDDDDTTTTTTTVVVVVVVVVVVVVVEEEEEEEEEPPPPPPPYYYYYYYYYYYYNNNNNNNNAAAAATTTTTTTLLLLLLLLSSSSSSVVVVVVVHHHHHHHHHHQQQQQQQQQLLLLLLLLVVVVVVVEEEEEEEEENNNNNNNNAAAAADDDDDDDDEEEEEEEEECCCCCCMMMMMMMMVVVVVVVLLLLLLLLDDDDDDDDNNNNNNNNEEEEEEEEEAAAAALLLLLLLLYYYYYYYYYYYYDDDDDDDDIIIIIIIICCCCCCFFFFFFFFFFFRRRRRRRRRRRTTTTTTTLLLLLLLLKKKKKKKKKLLLLLLLLTTTTTTTTTTTTTTPPPPPPPSSSSSSFFFFFFFFFFFGGGGDDDDDDDDLLLLLLLLNNNNNNNNHHHHHHHHHHLLLLLLLLIIIIIIIISSSSSSAAAAATTTTTTTMMMMMMMMSSSSSSGGGGVVVVVVVTTTTTTTCCCCCCCCCCCCLLLLLLLLRRRRRRRRRRRFFFFFFFFFFFPPPPPPPGGGGQQQQQQQQQLLLLLLLLNNNNNNNNSSSSSSDDDDDDDDLLLLLLLLRRRRRRRRRRRKKKKKKKKKLLLLLLLLAAAAAVVVVVVVNNNNNNNNLLLLLLLLIIIIIIIIPPPPPPPFFFFFFFFFFFPPPPPPPRRRRRRRRRRRLLLLLLLLHHHHHHHHHHFFFFFFFFFFFFFFFFFFFFFFMMMMMMMMVVVVVVVGGGGFFFFFFFFFFFAAAAAPPPPPPPLLLLLLLLTTTTTTTSSSSSSRRRRRRRRRRRGGGGSSSSSSQQQQQQQQQQQQQQQQQQYYYYYYYYYYYYRRRRRRRRRRRAAAAALLLLLLLLTTTTTTTVVVVVVVPPPPPPPEEEEEEEEELLLLLLLLTTTTTTTQQQQQQQQQQQQQQQQQQMMMMMMMMWWWWWWWWWWWWWWDDDDDDDDSSSSSSKKKKKKKKKNNNNNNNNMMMMMMMMMMMMMMMMCCCCCCAAAAAAAAAADDDDDDDDPPPPPPPRRRRRRRRRRRHHHHHHHHHHGGGGRRRRRRRRRRRYYYYYYYYYYYYLLLLLLLLTTTTTTTAAAAASSSSSSAAAAAMMMMMMMMFFFFFFFFFFFRRRRRRRRRRRGGGGKKKKKKKKKMMMMMMMMSSSSSSTTTTTTTKKKKKKKKKEEEEEEEEEVVVVVVVDDDDDDDDEEEEEEEEEQQQQQQQQQMMMMMMMMIIIIIIIINNNNNNNNVVVVVVVQQQQQQQQQNNNNNNNNKKKKKKKKKNNNNNNNNSSSSSSSSSSSSYYYYYYYYYYYYFFFFFFFFFFFVVVVVVVEEEEEEEEEWWWWWWWWWWWWWWIIIIIIIIPPPPPPPNNNNNNNNNNNNNNNNVVVVVVVKKKKKKKKKSSSSSSSSSSSSVVVVVVVCCCCCCDDDDDDDDIIIIIIIIAAAAAPPPPPPPRRRRRRRRRRRGGGGLLLLLLLLSSSSSSMMMMMMMMAAAAASSSSSSTTTTTTTFFFFFFFFFFFIIIIIIIIGGGGNNNNNNNNSSSSSSTTTTTTTSSSSSSIIIIIIIIQQQQQQQQQEEEEEEEEEMMMMMMMMFFFFFFFFFFFRRRRRRRRRRRRRRRRRRRRRRVVVVVVVSSSSSSEEEEEEEEEQQQQQQQQQFFFFFFFFFFFTTTTTTTAAAAAMMMMMMMMFFFFFFFFFFFRRRRRRRRRRRRRRRRRRRRRRKKKKKKKKKAAAAAFFFFFFFFFFFLLLLLLLLHHHHHHHHHHWWWWWWWWWWWWWWYYYYYYYYYYYYTTTTTTTGGGGEEEEEEEEEGGGGMMMMMMMMDDDDDDDDEEEEEEEEEMMMMMMMMEEEEEEEEEFFFFFFFFFFFTTTTTTTEEEEEEEEEAAAAAEEEEEEEEESSSSSSNNNNNNNNMMMMMMMMNNNNNNNNDDDDDDDDLLLLLLLLVVVVVVVSSSSSSEEEEEEEEEYYYYYYYYYYYYQQQQQQQQQQQQQQQQQQYYYYYYYYYYYYQQQQQQQQQDDDDDDDDAAAAATTTTTTTAAAAADDDDDDDDDDDDDDDDEEEEEEEEEGGGGEEEEEEEEEYYYYYYYYYYYYEEEEEEEEEEEEEEEEEEDDDDDDDDEEEEEEEEEDDDDDDDDEEEEEEEEEEEEEEEEEEEEEEEEEEEIIIIIIIILLLLLLLLDDDDDDDDHHHHHHHHHHEEEEEEEEEE

SEQ ID NO: 189 - protein, 3519 aa, Gallus gallus
MMMMMMMMRRRRRRRRRRREEEEEEEEEIIIIIIIIVVVVVVVHHHHHHHHHHLLLLLLLLQQQQQQQQQIIIIIIIIGGGGQQQQQQQQQCCCCCCGGGGNNNNNNNNQQQQQQQQQIIIIIIIIGGGGAAAAAKKKKKKKKKFFFFFFFFFFFWWWWWWWWWWWWWWEEEEEEEEEVVVVVVVIIIIIIIISSSSSSDDDDDDDDEEEEEEEEEHHHHHHHHHHGGGGIIIIIIIIDDDDDDDDIIIIIIIIAAAAAGGGGNNNNNNNNYYYYYYYYYYYYCCCCCCGGGGNNNNNNNNAAAAASSSSSSLLLLLLLLQQQQQQQQQLLLLLLLLEEEEEEEEERRRRRRRRRRRIIIIIIIINNNNNNNNVVVVVVVYYYYYYYYYYYYFFFFFFFFFFFNNNNNNNNEEEEEEEEEAAAAAYYYYYYYYYYYYSSSSSSHHHHHHHHHHKKKKKKKKKYYYYYYYYYYYYVVVVVVVPPPPPPPRRRRRRRRRRRSSSSSSIIIIIIIILLLLLLLLVVVVVVVDDDDDDDDLLLLLLLLEEEEEEEEEPPPPPPPGGGGTTTTTTTMMMMMMMMDDDDDDDDSSSSSSVVVVVVVRRRRRRRRRRRSSSSSSSSSSSSKKKKKKKKKIIIIIIIIGGGGPPPPPPPLLLLLLLLFFFFFFFFFFFRRRRRRRRRRRPPPPPPPDDDDDDDDNNNNNNNNFFFFFFFFFFFIIIIIIIIHHHHHHHHHHGGGGNNNNNNNNSSSSSSGGGGAAAAAGGGGNNNNNNNNNNNNNNNNWWWWWWWWWWWWWWAAAAAKKKKKKKKKGGGGHHHHHHHHHHYYYYYYYYYYYYTTTTTTTEEEEEEEEEGGGGAAAAAEEEEEEEEELLLLLLLLIIIIIIIIEEEEEEEEENNNNNNNNVVVVVVVMMMMMMMMDDDDDDDDVVVVVVVVVVVVVVRRRRRRRRRRRNNNNNNNNEEEEEEEEECCCCCCEEEEEEEEESSSSSSCCCCCCDDDDDDDDCCCCCCLLLLLLLLQQQQQQQQQGGGGFFFFFFFFFFFQQQQQQQQQLLLLLLLLIIIIIIIIHHHHHHHHHHSSSSSSLLLLLLLLGGGGGGGGGGGGTTTTTTTGGGGSSSSSSGGGGMMMMMMMMGGGGTTTTTTTLLLLLLLLLLLLLLLLIIIIIIIINNNNNNNNKKKKKKKKKIIIIIIIIRRRRRRRRRRREEEEEEEEEEEEEEEEEEYYYYYYYYYYYYPPPPPPPDDDDDDDDRRRRRRRRRRRIIIIIIIIMMMMMMMMNNNNNNNNTTTTTTTFFFFFFFFFFFSSSSSSVVVVVVVVVVVVVVPPPPPPPSSSSSSPPPPPPPKKKKKKKKKVVVVVVVSSSSSSDDDDDDDDTTTTTTTVVVVVVVVVVVVVVEEEEEEEEEPPPPPPPYYYYYYYYYYYYNNNNNNNNAAAAAIIIIIIIILLLLLLLLSSSSSSIIIIIIIIHHHHHHHHHHQQQQQQQQQLLLLLLLLIIIIIIIIEEEEEEEEENNNNNNNNTTTTTTTDDDDDDDDEEEEEEEEETTTTTTTFFFFFFFFFFFCCCCCCIIIIIIIIDDDDDDDDNNNNNNNNEEEEEEEEEAAAAALLLLLLLLYYYYYYYYYYYYDDDDDDDDIIIIIIIICCCCCCFFFFFFFFFFFRRRRRRRRRRRTTTTTTTLLLLLLLLKKKKKKKKKLLLLLLLLTTTTTTTNNNNNNNNPPPPPPPTTTTTTTYYYYYYYYYYYYGGGGDDDDDDDDLLLLLLLLNNNNNNNNHHHHHHHHHHLLLLLLLLVVVVVVVSSSSSSLLLLLLLLTTTTTTTMMMMMMMMSSSSSSGGGGVVVVVVVTTTTTTTTTTTTTTSSSSSSLLLLLLLLRRRRRRRRRRRFFFFFFFFFFFPPPPPPPGGGGQQQQQQQQQLLLLLLLLNNNNNNNNAAAAADDDDDDDDLLLLLLLLRRRRRRRRRRRKKKKKKKKKLLLLLLLLAAAAAVVVVVVVNNNNNNNNMMMMMMMMVVVVVVVPPPPPPPFFFFFFFFFFFPPPPPPPRRRRRRRRRRRLLLLLLLLHHHHHHHHHHFFFFFFFFFFFFFFFFFFFFFFMMMMMMMMPPPPPPPGGGGFFFFFFFFFFFAAAAAPPPPPPPLLLLLLLLTTTTTTTAAAAARRRRRRRRRRRGGGGSSSSSSQQQQQQQQQQQQQQQQQQYYYYYYYYYYYYRRRRRRRRRRRAAAAALLLLLLLLSSSSSSVVVVVVVPPPPPPPEEEEEEEEELLLLLLLLTTTTTTTQQQQQQQQQQQQQQQQQQMMMMMMMMFFFFFFFFFFFDDDDDDDDAAAAARRRRRRRRRRRNNNNNNNNMMMMMMMMMMMMMMMMAAAAAAAAAACCCCCCDDDDDDDDPPPPPPPRRRRRRRRRRRRRRRRRRRRRRGGGGRRRRRRRRRRRYYYYYYYYYYYYLLLLLLLLTTTTTTTVVVVVVVAAAAACCCCCCIIIIIIIIFFFFFFFFFFFRRRRRRRRRRRGGGGRRRRRRRRRRRMMMMMMMMSSSSSSTTTTTTTRRRRRRRRRRREEEEEEEEEVVVVVVVDDDDDDDDEEEEEEEEEQQQQQQQQQLLLLLLLLLLLLLLLLSSSSSSVVVVVVVQQQQQQQQQTTTTTTTKKKKKKKKKNNNNNNNNSSSSSSSSSSSSYYYYYYYYYYYYFFFFFFFFFFFVVVVVVVEEEEEEEEEWWWWWWWWWWWWWWIIIIIIIIPPPPPPPNNNNNNNNNNNNNNNNVVVVVVVKKKKKKKKKVVVVVVVAAAAAVVVVVVVCCCCCCDDDDDDDDIIIIIIIIPPPPPPPPPPPPPPRRRRRRRRRRRGGGGLLLLLLLLKKKKKKKKKMMMMMMMMAAAAAAAAAATTTTTTTFFFFFFFFFFFIIIIIIIIGGGGNNNNNNNNNNNNNNNNTTTTTTTAAAAAIIIIIIIIQQQQQQQQQEEEEEEEEELLLLLLLLFFFFFFFFFFFIIIIIIIIRRRRRRRRRRRVVVVVVVSSSSSSEEEEEEEEEQQQQQQQQQFFFFFFFFFFFSSSSSSAAAAAMMMMMMMMFFFFFFFFFFFRRRRRRRRRRRRRRRRRRRRRRKKKKKKKKKAAAAAFFFFFFFFFFFLLLLLLLLHHHHHHHHHHWWWWWWWWWWWWWWYYYYYYYYYYYYTTTTTTTGGGGEEEEEEEEEGGGGMMMMMMMMDDDDDDDDEEEEEEEEEMMMMMMMMEEEEEEEEEFFFFFFFFFFFSSSSSSEEEEEEEEEAAAAAEEEEEEEEEGGGGNNNNNNNNTTTTTTTNNNNNNNNDDDDDDDDLLLLLLLLVVVVVVVSSSSSSEEEEEEEEEYYYYYYYYYYYYQQQQQQQQQQQQQQQQQQYYYYYYYYYYYYQQQQQQQQQDDDDDDDDAAAAATTTTTTTAAAAADDDDDDDDVVVVVVVEEEEEEEEEEEEEEEEEEYYYYYYYYYYYYEEEEEEEEEEEEEEEEEEAAAAAEEEEEEEEEAAAAASSSSSSPPPPPPPEEEEEEEEEKKKKKKKKKEEEEEEEEETTTTTTTT

SEQ ID NO: 190 - protein, 3511 aa, Ectocarpus variabilis
MMMMMMMMRRRRRRRRRRREEEEEEEEEIIIIIIIIVVVVVVVHHHHHHHHHHVVVVVVVQQQQQQQQQAAAAAGGGGQQQQQQQQQCCCCCCGGGGNNNNNNNNQQQQQQQQQIIIIIIIIGGGGSSSSSSKKKKKKKKKFFFFFFFFFFFWWWWWWWWWWWWWWEEEEEEEEEVVVVVVVIIIIIIIISSSSSSDDDDDDDDEEEEEEEEEHHHHHHHHHHGGGGIIIIIIIIDDDDDDDDPPPPPPPTTTTTTTGGGGRRRRRRRRRRRYYYYYYYYYYYYHHHHHHHHHHGGGGDDDDDDDDSSSSSSDDDDDDDDLLLLLLLLQQQQQQQQQLLLLLLLLEEEEEEEEERRRRRRRRRRRIIIIIIIINNNNNNNNCCCCCCYYYYYYYYYYYYFFFFFFFFFFFNNNNNNNNEEEEEEEEEAAAAATTTTTTTAAAAAGGGGRRRRRRRRRRRYYYYYYYYYYYYVVVVVVVPPPPPPPRRRRRRRRRRRAAAAAIIIIIIIILLLLLLLLMMMMMMMMDDDDDDDDLLLLLLLLEEEEEEEEEPPPPPPPGGGGTTTTTTTMMMMMMMMDDDDDDDDSSSSSSVVVVVVVRRRRRRRRRRRAAAAAGGGGPPPPPPPFFFFFFFFFFFGGGGQQQQQQQQQLLLLLLLLFFFFFFFFFFFRRRRRRRRRRRPPPPPPPDDDDDDDDNNNNNNNNFFFFFFFFFFFVVVVVVVFFFFFFFFFFFGGGGQQQQQQQQQTTTTTTTGGGGAAAAAGGGGNNNNNNNNNNNNNNNNWWWWWWWWWWWWWWAAAAAKKKKKKKKKGGGGHHHHHHHHHHYYYYYYYYYYYYTTTTTTTEEEEEEEEEGGGGAAAAAEEEEEEEEELLLLLLLLIIIIIIIIDDDDDDDDSSSSSSVVVVVVVLLLLLLLLDDDDDDDDVVVVVVVVVVVVVVRRRRRRRRRRRKKKKKKKKKEEEEEEEEEAAAAAEEEEEEEEESSSSSSCCCCCCDDDDDDDDAAAAALLLLLLLLQQQQQQQQQGGGGFFFFFFFFFFFQQQQQQQQQLLLLLLLLTTTTTTTHHHHHHHHHHSSSSSSMMMMMMMMGGGGGGGGGGGGTTTTTTTGGGGAAAAAGGGGMMMMMMMMGGGGTTTTTTTLLLLLLLLLLLLLLLLIIIIIIIISSSSSSKKKKKKKKKVVVVVVVRRRRRRRRRRREEEEEEEEEEEEEEEEEEYYYYYYYYYYYYPPPPPPPDDDDDDDDRRRRRRRRRRRIIIIIIIIMMMMMMMMSSSSSSTTTTTTTYYYYYYYYYYYYSSSSSSVVVVVVVIIIIIIIIPPPPPPPSSSSSSPPPPPPPKKKKKKKKKVVVVVVVSSSSSSDDDDDDDDTTTTTTTVVVVVVVVVVVVVVEEEEEEEEEPPPPPPPYYYYYYYYYYYYNNNNNNNNAAAAATTTTTTTLLLLLLLLSSSSSSVVVVVVVHHHHHHHHHHQQQQQQQQQLLLLLLLLVVVVVVVEEEEEEEEENNNNNNNNAAAAADDDDDDDDQQQQQQQQQCCCCCCFFFFFFFFFFFTTTTTTTLLLLLLLLDDDDDDDDNNNNNNNNEEEEEEEEEAAAAALLLLLLLLYYYYYYYYYYYYDDDDDDDDIIIIIIIICCCCCCFFFFFFFFFFFRRRRRRRRRRRTTTTTTTLLLLLLLLKKKKKKKKKLLLLLLLLTTTTTTTTTTTTTTPPPPPPPTTTTTTTYYYYYYYYYYYYGGGGDDDDDDDDLLLLLLLLNNNNNNNNHHHHHHHHHHLLLLLLLLVVVVVVVSSSSSSAAAAAAAAAAIIIIIIIICCCCCCGGGGTTTTTTTTTTTTTTCCCCCCSSSSSSLLLLLLLLRRRRRRRRRRRFFFFFFFFFFFPPPPPPPGGGGQQQQQQQQQLLLLLLLLNNNNNNNNCCCCCCDDDDDDDDLLLLLLLLRRRRRRRRRRRKKKKKKKKKLLLLLLLLAAAAAVVVVVVVNNNNNNNNMMMMMMMMVVVVVVVPPPPPPPFFFFFFFFFFFPPPPPPPRRRRRRRRRRRLLLLLLLLHHHHHHHHHHFFFFFFFFFFFFFFFFFFFFFFMMMMMMMMIIIIIIIIGGGGFFFFFFFFFFFAAAAAPPPPPPPLLLLLLLLTTTTTTTSSSSSSRRRRRRRRRRRGGGGSSSSSSQQQQQQQQQQQQQQQQQQYYYYYYYYYYYYRRRRRRRRRRRAAAAALLLLLLLLTTTTTTTVVVVVVVPPPPPPPEEEEEEEEELLLLLLLLTTTTTTTQQQQQQQQQQQQQQQQQQCCCCCCFFFFFFFFFFFDDDDDDDDSSSSSSKKKKKKKKKNNNNNNNNMMMMMMMMMMMMMMMMCCCCCCAAAAAAAAAADDDDDDDDPPPPPPPRRRRRRRRRRRHHHHHHHHHHGGGGRRRRRRRRRRRYYYYYYYYYYYYLLLLLLLLTTTTTTTCCCCCCAAAAAVVVVVVVMMMMMMMMFFFFFFFFFFFRRRRRRRRRRRGGGGRRRRRRRRRRRMMMMMMMMSSSSSSTTTTTTTKKKKKKKKKEEEEEEEEEVVVVVVVDDDDDDDDEEEEEEEEEQQQQQQQQQMMMMMMMMLLLLLLLLNNNNNNNNVVVVVVVVVVVVVVNNNNNNNNKKKKKKKKKNNNNNNNNSSSSSSSSSSSSYYYYYYYYYYYYFFFFFFFFFFFVVVVVVVEEEEEEEEEWWWWWWWWWWWWWWIIIIIIIIPPPPPPPNNNNNNNNNNNNNNNNVVVVVVVKKKKKKKKKAAAAASSSSSSIIIIIIIICCCCCCDDDDDDDDIIIIIIIIPPPPPPPPPPPPPPKKKKKKKKKGGGGLLLLLLLLKKKKKKKKKMMMMMMMMSSSSSSTTTTTTTTTTTTTTFFFFFFFFFFFVVVVVVVGGGGNNNNNNNNTTTTTTTTTTTTTTAAAAAIIIIIIIIQQQQQQQQQEEEEEEEEEVVVVVVVWWWWWWWWWWWWWWKKKKKKKKKRRRRRRRRRRRVVVVVVVAAAAAEEEEEEEEEQQQQQQQQQFFFFFFFFFFFTTTTTTTAAAAAMMMMMMMMFFFFFFFFFFFRRRRRRRRRRRRRRRRRRRRRRKKKKKKKKKAAAAAFFFFFFFFFFFLLLLLLLLHHHHHHHHHHWWWWWWWWWWWWWWYYYYYYYYYYYYTTTTTTTGGGGEEEEEEEEEGGGGMMMMMMMMDDDDDDDDEEEEEEEEEMMMMMMMMEEEEEEEEEFFFFFFFFFFFTTTTTTTEEEEEEEEEAAAAAEEEEEEEEESSSSSSNNNNNNNNMMMMMMMMNNNNNNNNDDDDDDDDLLLLLLLLVVVVVVVSSSSSSEEEEEEEEEYYYYYYYYYYYYQQQQQQQQQQQQQQQQQQYYYYYYYYYYYYQQQQQQQQQDDDDDDDDAAAAATTTTTTTAAAAAEEEEEEEEEEEEEEEEEEEEEEEEEEEGGGGEEEEEEEEEFFFFFFFFFFFDDDDDDDDEEEEEEEEEDDDDDDDDEEEEEEEEEEEEEEEEEELLLLLLLLDDDDDDDDDDDDDDDDGGGGMMMMMMMMMMMMMMMMM

SEQ ID NO: 191 - protein, 3512 aa, Zea mays
MMMMMMMMRRRRRRRRRRREEEEEEEEEIIIIIIIILLLLLLLLHHHHHHHHHHIIIIIIIIQQQQQQQQQGGGGGGGGQQQQQQQQQCCCCCCGGGGNNNNNNNNQQQQQQQQQIIIIIIIIGGGGAAAAAKKKKKKKKKFFFFFFFFFFFWWWWWWWWWWWWWWEEEEEEEEEVVVVVVVVVVVVVVCCCCCCDDDDDDDDEEEEEEEEEHHHHHHHHHHGGGGIIIIIIIIDDDDDDDDPPPPPPPTTTTTTTGGGGRRRRRRRRRRRYYYYYYYYYYYYTTTTTTTGGGGNNNNNNNNSSSSSSDDDDDDDDLLLLLLLLQQQQQQQQQLLLLLLLLEEEEEEEEERRRRRRRRRRRVVVVVVVNNNNNNNNVVVVVVVYYYYYYYYYYYYYYYYYYYYYYYYNNNNNNNNEEEEEEEEEAAAAASSSSSSCCCCCCGGGGRRRRRRRRRRRFFFFFFFFFFFVVVVVVVPPPPPPPRRRRRRRRRRRAAAAAVVVVVVVLLLLLLLLMMMMMMMMDDDDDDDDLLLLLLLLEEEEEEEEEPPPPPPPGGGGTTTTTTTMMMMMMMMDDDDDDDDSSSSSSVVVVVVVRRRRRRRRRRRTTTTTTTGGGGPPPPPPPYYYYYYYYYYYYGGGGQQQQQQQQQIIIIIIIIFFFFFFFFFFFRRRRRRRRRRRPPPPPPPDDDDDDDDNNNNNNNNFFFFFFFFFFFVVVVVVVFFFFFFFFFFFGGGGQQQQQQQQQSSSSSSGGGGAAAAAGGGGNNNNNNNNNNNNNNNNWWWWWWWWWWWWWWAAAAAKKKKKKKKKGGGGHHHHHHHHHHYYYYYYYYYYYYTTTTTTTEEEEEEEEEGGGGAAAAAEEEEEEEEELLLLLLLLIIIIIIIIDDDDDDDDSSSSSSVVVVVVVLLLLLLLLDDDDDDDDVVVVVVVVVVVVVVRRRRRRRRRRRKKKKKKKKKEEEEEEEEEAAAAAEEEEEEEEENNNNNNNNCCCCCCDDDDDDDDCCCCCCLLLLLLLLQQQQQQQQQGGGGFFFFFFFFFFFQQQQQQQQQVVVVVVVCCCCCCHHHHHHHHHHSSSSSSLLLLLLLLGGGGGGGGGGGGTTTTTTTGGGGSSSSSSGGGGMMMMMMMMGGGGTTTTTTTLLLLLLLLLLLLLLLLIIIIIIIISSSSSSKKKKKKKKKIIIIIIIIRRRRRRRRRRREEEEEEEEEEEEEEEEEEYYYYYYYYYYYYPPPPPPPDDDDDDDDRRRRRRRRRRRMMMMMMMMMMMMMMMMLLLLLLLLTTTTTTTFFFFFFFFFFFSSSSSSVVVVVVVFFFFFFFFFFFPPPPPPPSSSSSSPPPPPPPKKKKKKKKKVVVVVVVSSSSSSDDDDDDDDTTTTTTTVVVVVVVVVVVVVVEEEEEEEEEPPPPPPPYYYYYYYYYYYYNNNNNNNNAAAAATTTTTTTLLLLLLLLSSSSSSVVVVVVVHHHHHHHHHHQQQQQQQQQLLLLLLLLVVVVVVVEEEEEEEEENNNNNNNNAAAAADDDDDDDDEEEEEEEEECCCCCCMMMMMMMMVVVVVVVLLLLLLLLDDDDDDDDNNNNNNNNEEEEEEEEEAAAAALLLLLLLLYYYYYYYYYYYYDDDDDDDDIIIIIIIICCCCCCFFFFFFFFFFFRRRRRRRRRRRTTTTTTTLLLLLLLLKKKKKKKKKLLLLLLLLTTTTTTTTTTTTTTPPPPPPPSSSSSSFFFFFFFFFFFGGGGDDDDDDDDLLLLLLLLNNNNNNNNHHHHHHHHHHLLLLLLLLIIIIIIIISSSSSSAAAAATTTTTTTMMMMMMMMSSSSSSGGGGVVVVVVVTTTTTTTCCCCCCCCCCCCLLLLLLLLRRRRRRRRRRRFFFFFFFFFFFPPPPPPPGGGGQQQQQQQQQLLLLLLLLNNNNNNNNSSSSSSDDDDDDDDLLLLLLLLRRRRRRRRRRRKKKKKKKKKLLLLLLLLAAAAAVVVVVVVNNNNNNNNLLLLLLLLIIIIIIIIPPPPPPPFFFFFFFFFFFPPPPPPPRRRRRRRRRRRLLLLLLLLHHHHHHHHHHFFFFFFFFFFFFFFFFFFFFFFMMMMMMMMVVVVVVVGGGGFFFFFFFFFFFAAAAAPPPPPPPLLLLLLLLTTTTTTTSSSSSSRRRRRRRRRRRGGGGSSSSSSQQQQQQQQQQQQQQQQQQYYYYYYYYYYYYRRRRRRRRRRRAAAAALLLLLLLLTTTTTTTVVVVVVVPPPPPPPEEEEEEEEELLLLLLLLTTTTTTTQQQQQQQQQQQQQQQQQQMMMMMMMMWWWWWWWWWWWWWWDDDDDDDDAAAAAKKKKKKKKKNNNNNNNNMMMMMMMMMMMMMMMMCCCCCCAAAAAAAAAADDDDDDDDPPPPPPPRRRRRRRRRRRHHHHHHHHHHGGGGRRRRRRRRRRRYYYYYYYYYYYYLLLLLLLLTTTTTTTAAAAASSSSSSAAAAAMMMMMMMMFFFFFFFFFFFRRRRRRRRRRRGGGGKKKKKKKKKMMMMMMMMSSSSSSTTTTTTTKKKKKKKKKEEEEEEEEEVVVVVVVDDDDDDDDEEEEEEEEEQQQQQQQQQMMMMMMMMIIIIIIIINNNNNNNNVVVVVVVQQQQQQQQQNNNNNNNNKKKKKKKKKNNNNNNNNSSSSSSSSSSSSYYYYYYYYYYYYFFFFFFFFFFFVVVVVVVEEEEEEEEEWWWWWWWWWWWWWWIIIIIIIIPPPPPPPNNNNNNNNNNNNNNNNVVVVVVVKKKKKKKKKSSSSSSSSSSSSVVVVVVVCCCCCCDDDDDDDDIIIIIIIIPPPPPPPPPPPPPPRRRRRRRRRRRGGGGLLLLLLLLSSSSSSMMMMMMMMAAAAASSSSSSTTTTTTTFFFFFFFFFFFIIIIIIIIGGGGNNNNNNNNSSSSSSTTTTTTTSSSSSSIIIIIIIIQQQQQQQQQEEEEEEEEEMMMMMMMMFFFFFFFFFFFRRRRRRRRRRRRRRRRRRRRRRVVVVVVVSSSSSSEEEEEEEEEQQQQQQQQQFFFFFFFFFFFTTTTTTTAAAAAMMMMMMMMFFFFFFFFFFFRRRRRRRRRRRRRRRRRRRRRRKKKKKKKKKAAAAAFFFFFFFFFFFLLLLLLLLHHHHHHHHHHWWWWWWWWWWWWWWYYYYYYYYYYYYTTTTTTTGGGGEEEEEEEEEGGGGMMMMMMMMDDDDDDDDEEEEEEEEEMMMMMMMMEEEEEEEEEFFFFFFFFFFFTTTTTTTEEEEEEEEEAAAAAEEEEEEEEESSSSSSNNNNNNNNMMMMMMMMNNNNNNNNDDDDDDDDLLLLLLLLVVVVVVVSSSSSSEEEEEEEEEYYYYYYYYYYYYQQQQQQQQQQQQQQQQQQYYYYYYYYYYYYQQQQQQQQQDDDDDDDDAAAAATTTTTTTAAAAADDDDDDDDEEEEEEEEEEEEEEEEEEEEEEEEEEEYYYYYYYYYYYYEEEEEEEEEDDDDDDDDEEEEEEEEEEEEEEEEEEEEEEEEEEEVVVVVVVQQQQQQQQQAAAAADDDDDDDDDDDDDDDDMMMMMMMMM

SEQ ID NO: 192 - protein, 3552 aa, Arabidopsis thaliana
MMMMMMMMRRRRRRRRRRREEEEEEEEEIIIIIIIILLLLLLLLHHHHHHHHHHIIIIIIIIQQQQQQQQQGGGGGGGGQQQQQQQQQCCCCCCGGGGNNNNNNNNQQQQQQQQQIIIIIIIIGGGGSSSSSSKKKKKKKKKFFFFFFFFFFFWWWWWWWWWWWWWWEEEEEEEEEVVVVVVVVVVVVVVNNNNNNNNLLLLLLLLEEEEEEEEEHHHHHHHHHHGGGGIIIIIIIIDDDDDDDDQQQQQQQQQTTTTTTTGGGGRRRRRRRRRRRYYYYYYYYYYYYVVVVVVVGGGGDDDDDDDDSSSSSSEEEEEEEEELLLLLLLLQQQQQQQQQLLLLLLLLEEEEEEEEERRRRRRRRRRRVVVVVVVNNNNNNNNVVVVVVVYYYYYYYYYYYYYYYYYYYYYYYYNNNNNNNNEEEEEEEEEAAAAASSSSSSCCCCCCGGGGRRRRRRRRRRRYYYYYYYYYYYYVVVVVVVPPPPPPPRRRRRRRRRRRAAAAAVVVVVVVLLLLLLLLMMMMMMMMDDDDDDDDLLLLLLLLEEEEEEEEEPPPPPPPGGGGTTTTTTTMMMMMMMMDDDDDDDDSSSSSSVVVVVVVRRRRRRRRRRRSSSSSSGGGGPPPPPPPYYYYYYYYYYYYGGGGQQQQQQQQQIIIIIIIIFFFFFFFFFFFRRRRRRRRRRRPPPPPPPDDDDDDDDNNNNNNNNFFFFFFFFFFFVVVVVVVFFFFFFFFFFFGGGGQQQQQQQQQSSSSSSGGGGAAAAAGGGGNNNNNNNNNNNNNNNNWWWWWWWWWWWWWWAAAAAKKKKKKKKKGGGGHHHHHHHHHHYYYYYYYYYYYYTTTTTTTEEEEEEEEEGGGGAAAAAEEEEEEEEELLLLLLLLIIIIIIIIDDDDDDDDSSSSSSVVVVVVVLLLLLLLLDDDDDDDDVVVVVVVVVVVVVVRRRRRRRRRRRKKKKKKKKKEEEEEEEEEAAAAAEEEEEEEEENNNNNNNNCCCCCCDDDDDDDDCCCCCCLLLLLLLLQQQQQQQQQGGGGFFFFFFFFFFFQQQQQQQQQVVVVVVVCCCCCCHHHHHHHHHHSSSSSSLLLLLLLLGGGGGGGGGGGGTTTTTTTGGGGSSSSSSGGGGMMMMMMMMGGGGTTTTTTTLLLLLLLLLLLLLLLLIIIIIIIISSSSSSKKKKKKKKKIIIIIIIIRRRRRRRRRRREEEEEEEEEEEEEEEEEEYYYYYYYYYYYYPPPPPPPDDDDDDDDRRRRRRRRRRRMMMMMMMMMMMMMMMMMMMMMMMMTTTTTTTFFFFFFFFFFFSSSSSSVVVVVVVFFFFFFFFFFFPPPPPPPSSSSSSPPPPPPPKKKKKKKKKVVVVVVVSSSSSSDDDDDDDDTTTTTTTVVVVVVVVVVVVVVEEEEEEEEEPPPPPPPYYYYYYYYYYYYNNNNNNNNAAAAATTTTTTTLLLLLLLLSSSSSSVVVVVVVHHHHHHHHHHQQQQQQQQQLLLLLLLLVVVVVVVEEEEEEEEENNNNNNNNAAAAADDDDDDDDEEEEEEEEECCCCCCMMMMMMMMVVVVVVVLLLLLLLLDDDDDDDDNNNNNNNNEEEEEEEEEAAAAALLLLLLLLYYYYYYYYYYYYDDDDDDDDIIIIIIIICCCCCCFFFFFFFFFFFRRRRRRRRRRRTTTTTTTLLLLLLLLKKKKKKKKKLLLLLLLLSSSSSSTTTTTTTPPPPPPPSSSSSSFFFFFFFFFFFGGGGDDDDDDDDLLLLLLLLNNNNNNNNHHHHHHHHHHLLLLLLLLIIIIIIIISSSSSSAAAAATTTTTTTMMMMMMMMSSSSSSGGGGVVVVVVVTTTTTTTCCCCCCCCCCCCLLLLLLLLRRRRRRRRRRRFFFFFFFFFFFPPPPPPPGGGGQQQQQQQQQLLLLLLLLNNNNNNNNSSSSSSDDDDDDDDLLLLLLLLRRRRRRRRRRRKKKKKKKKKLLLLLLLLAAAAAVVVVVVVNNNNNNNNLLLLLLLLIIIIIIIIPPPPPPPFFFFFFFFFFFPPPPPPPRRRRRRRRRRRLLLLLLLLHHHHHHHHHHFFFFFFFFFFFFFFFFFFFFFFMMMMMMMMVVVVVVVGGGGFFFFFFFFFFFAAAAAPPPPPPPLLLLLLLLTTTTTTTSSSSSSRRRRRRRRRRRGGGGSSSSSSQQQQQQQQQQQQQQQQQQYYYYYYYYYYYYRRRRRRRRRRRNNNNNNNNLLLLLLLLTTTTTTTVVVVVVVPPPPPPPEEEEEEEEELLLLLLLLTTTTTTTQQQQQQQQQQQQQQQQQQMMMMMMMMWWWWWWWWWWWWWWDDDDDDDDAAAAAKKKKKKKKKNNNNNNNNMMMMMMMMMMMMMMMMCCCCCCAAAAAAAAAADDDDDDDDPPPPPPPRRRRRRRRRRRHHHHHHHHHHGGGGRRRRRRRRRRRYYYYYYYYYYYYLLLLLLLLTTTTTTTAAAAASSSSSSAAAAAMMMMMMMMFFFFFFFFFFFRRRRRRRRRRRGGGGKKKKKKKKKMMMMMMMMSSSSSSTTTTTTTKKKKKKKKKEEEEEEEEEVVVVVVVDDDDDDDDEEEEEEEEEQQQQQQQQQMMMMMMMMLLLLLLLLNNNNNNNNVVVVVVVQQQQQQQQQNNNNNNNNKKKKKKKKKNNNNNNNNSSSSSSSSSSSSYYYYYYYYYYYYFFFFFFFFFFFVVVVVVVEEEEEEEEEWWWWWWWWWWWWWWIIIIIIIIPPPPPPPNNNNNNNNNNNNNNNNVVVVVVVKKKKKKKKKSSSSSSTTTTTTTVVVVVVVCCCCCCDDDDDDDDIIIIIIIIPPPPPPPPPPPPPPTTTTTTTGGGGLLLLLLLLKKKKKKKKKMMMMMMMMAAAAASSSSSSTTTTTTTFFFFFFFFFFFIIIIIIIIGGGGNNNNNNNNSSSSSSTTTTTTTSSSSSSIIIIIIIIQQQQQQQQQEEEEEEEEEMMMMMMMMFFFFFFFFFFFRRRRRRRRRRRRRRRRRRRRRRVVVVVVVSSSSSSEEEEEEEEEQQQQQQQQQFFFFFFFFFFFTTTTTTTAAAAAMMMMMMMMFFFFFFFFFFFRRRRRRRRRRRRRRRRRRRRRRKKKKKKKKKAAAAAFFFFFFFFFFFLLLLLLLLHHHHHHHHHHWWWWWWWWWWWWWWYYYYYYYYYYYYTTTTTTTGGGGEEEEEEEEEGGGGMMMMMMMMDDDDDDDDEEEEEEEEEMMMMMMMMEEEEEEEEEFFFFFFFFFFFTTTTTTTEEEEEEEEEAAAAAEEEEEEEEESSSSSSNNNNNNNNMMMMMMMMNNNNNNNNDDDDDDDDLLLLLLLLVVVVVVVSSSSSSEEEEEEEEEYYYYYYYYYYYYQQQQQQQQQQQQQQQQQQYYYYYYYYYYYYQQQQQQQQQDDDDDDDDAAAAATTTTTTTAAAAADDDDDDDDEEEEEEEEEEEEEEEEEEGGGGEEEEEEEEEYYYYYYYYYYYYEEEEEEEEEEEEEEEEEEEEEEEEEEEEEEEEEEEEAAAAAEEEEEEEEEYYYYYYYYYYYYEEEEEEEEEQQQQQQQQQEEEEEEEEEEEEEEEEEETTTTTTTYYYYYYYYYYYYY

SEQ ID NO: 193 - protein, 3461 aa, Caenorhabditis briggsae
MMMMMMMMRRRRRRRRRRREEEEEEEEEIIIIIIIIVVVVVVVHHHHHHHHHHIIIIIIIIQQQQQQQQQAAAAAGGGGQQQQQQQQQCCCCCCGGGGNNNNNNNNQQQQQQQQQIIIIIIIIGGGGSSSSSSKKKKKKKKKFFFFFFFFFFFWWWWWWWWWWWWWWEEEEEEEEEVVVVVVVIIIIIIIISSSSSSDDDDDDDDEEEEEEEEEHHHHHHHHHHGGGGIIIIIIIIDDDDDDDDPPPPPPPTTTTTTTGGGGQQQQQQQQQYYYYYYYYYYYYVVVVVVVGGGGDDDDDDDDSSSSSSDDDDDDDDLLLLLLLLQQQQQQQQQLLLLLLLLEEEEEEEEERRRRRRRRRRRIIIIIIIINNNNNNNNVVVVVVVYYYYYYYYYYYYYYYYYYYYYYYYNNNNNNNNEEEEEEEEEAAAAAGGGGSSSSSSNNNNNNNNKKKKKKKKKYYYYYYYYYYYYVVVVVVVPPPPPPPRRRRRRRRRRRAAAAAVVVVVVVLLLLLLLLVVVVVVVDDDDDDDDLLLLLLLLEEEEEEEEEPPPPPPPGGGGTTTTTTTMMMMMMMMDDDDDDDDSSSSSSVVVVVVVRRRRRRRRRRRSSSSSSGGGGPPPPPPPFFFFFFFFFFFGGGGQQQQQQQQQLLLLLLLLFFFFFFFFFFFRRRRRRRRRRRPPPPPPPDDDDDDDDNNNNNNNNYYYYYYYYYYYYVVVVVVVFFFFFFFFFFFGGGGQQQQQQQQQSSSSSSGGGGAAAAAGGGGNNNNNNNNNNNNNNNNWWWWWWWWWWWWWWAAAAAKKKKKKKKKGGGGHHHHHHHHHHYYYYYYYYYYYYTTTTTTTEEEEEEEEEGGGGAAAAAEEEEEEEEELLLLLLLLVVVVVVVDDDDDDDDNNNNNNNNVVVVVVVLLLLLLLLDDDDDDDDVVVVVVVVVVVVVVRRRRRRRRRRRKKKKKKKKKEEEEEEEEEAAAAAEEEEEEEEESSSSSSTTTTTTTDDDDDDDDCCCCCCLLLLLLLLQQQQQQQQQGGGGFFFFFFFFFFFQQQQQQQQQLLLLLLLLTTTTTTTHHHHHHHHHHSSSSSSLLLLLLLLGGGGGGGGGGGGTTTTTTTGGGGSSSSSSGGGGMMMMMMMMGGGGTTTTTTTLLLLLLLLLLLLLLLLIIIIIIIISSSSSSKKKKKKKKKIIIIIIIIRRRRRRRRRRREEEEEEEEEEEEEEEEEEYYYYYYYYYYYYPPPPPPPDDDDDDDDRRRRRRRRRRRIIIIIIIIMMMMMMMMNNNNNNNNTTTTTTTFFFFFFFFFFFSSSSSSVVVVVVVVVVVVVVPPPPPPPSSSSSSPPPPPPPKKKKKKKKKVVVVVVVSSSSSSDDDDDDDDTTTTTTTVVVVVVVVVVVVVVEEEEEEEEEPPPPPPPYYYYYYYYYYYYNNNNNNNNAAAAATTTTTTTLLLLLLLLSSSSSSVVVVVVVHHHHHHHHHHQQQQQQQQQLLLLLLLLVVVVVVVEEEEEEEEENNNNNNNNTTTTTTTDDDDDDDDEEEEEEEEETTTTTTTFFFFFFFFFFFCCCCCCIIIIIIIIDDDDDDDDNNNNNNNNEEEEEEEEEAAAAALLLLLLLLYYYYYYYYYYYYDDDDDDDDIIIIIIIICCCCCCFFFFFFFFFFFRRRRRRRRRRRTTTTTTTLLLLLLLLKKKKKKKKKLLLLLLLLTTTTTTTTTTTTTTPPPPPPPTTTTTTTYYYYYYYYYYYYGGGGDDDDDDDDLLLLLLLLNNNNNNNNHHHHHHHHHHLLLLLLLLVVVVVVVSSSSSSAAAAATTTTTTTMMMMMMMMSSSSSSGGGGVVVVVVVTTTTTTTTTTTTTTCCCCCCLLLLLLLLRRRRRRRRRRRFFFFFFFFFFFPPPPPPPGGGGQQQQQQQQQLLLLLLLLNNNNNNNNAAAAADDDDDDDDLLLLLLLLRRRRRRRRRRRKKKKKKKKKLLLLLLLLAAAAAVVVVVVVNNNNNNNNMMMMMMMMVVVVVVVPPPPPPPFFFFFFFFFFFPPPPPPPRRRRRRRRRRRLLLLLLLLHHHHHHHHHHFFFFFFFFFFFFFFFFFFFFFFMMMMMMMMPPPPPPPGGGGFFFFFFFFFFFAAAAAPPPPPPPLLLLLLLLTTTTTTTSSSSSSRRRRRRRRRRRSSSSSSNNNNNNNNQQQQQQQQQQQQQQQQQQYYYYYYYYYYYYRRRRRRRRRRRAAAAAIIIIIIIITTTTTTTVVVVVVVPPPPPPPEEEEEEEEELLLLLLLLTTTTTTTQQQQQQQQQQQQQQQQQQCCCCCCFFFFFFFFFFFDDDDDDDDAAAAAKKKKKKKKKNNNNNNNNMMMMMMMMMMMMMMMMAAAAAAAAAACCCCCCDDDDDDDDPPPPPPPRRRRRRRRRRRHHHHHHHHHHGGGGRRRRRRRRRRRYYYYYYYYYYYYLLLLLLLLTTTTTTTAAAAAAAAAAAAAAAIIIIIIIIFFFFFFFFFFFRRRRRRRRRRRGGGGRRRRRRRRRRRMMMMMMMMSSSSSSMMMMMMMMKKKKKKKKKEEEEEEEEEVVVVVVVDDDDDDDDEEEEEEEEEQQQQQQQQQMMMMMMMMLLLLLLLLNNNNNNNNIIIIIIIIQQQQQQQQQNNNNNNNNKKKKKKKKKNNNNNNNNSSSSSSSSSSSSYYYYYYYYYYYYFFFFFFFFFFFVVVVVVVDDDDDDDDWWWWWWWWWWWWWWIIIIIIIIPPPPPPPNNNNNNNNNNNNNNNNVVVVVVVKKKKKKKKKTTTTTTTAAAAAVVVVVVVCCCCCCDDDDDDDDIIIIIIIIPPPPPPPPPPPPPPRRRRRRRRRRRGGGGLLLLLLLLKKKKKKKKKMMMMMMMMSSSSSSAAAAATTTTTTTFFFFFFFFFFFIIIIIIIIGGGGNNNNNNNNSSSSSSTTTTTTTAAAAAIIIIIIIIQQQQQQQQQEEEEEEEEELLLLLLLLFFFFFFFFFFFKKKKKKKKKRRRRRRRRRRRIIIIIIIISSSSSSEEEEEEEEEQQQQQQQQQFFFFFFFFFFFTTTTTTTAAAAAMMMMMMMMFFFFFFFFFFFRRRRRRRRRRRRRRRRRRRRRRKKKKKKKKKAAAAAFFFFFFFFFFFLLLLLLLLHHHHHHHHHHWWWWWWWWWWWWWWYYYYYYYYYYYYTTTTTTTGGGGEEEEEEEEEGGGGMMMMMMMMDDDDDDDDEEEEEEEEEMMMMMMMMEEEEEEEEEFFFFFFFFFFFTTTTTTTEEEEEEEEEAAAAAEEEEEEEEESSSSSSNNNNNNNNMMMMMMMMNNNNNNNNDDDDDDDDLLLLLLLLVVVVVVVSSSSSSEEEEEEEEEYYYYYYYYYYYYQQQQQQQQQQQQQQQQQQYYYYYYYYYYYYQQQQQQQQQEEEEEEEEEAAAAAAAAAAAAAAADDDDDDDDEEEEEEEEEDDDDDDDDAAAAAAAAAAEEEEEEEEEAAAAAFFFFFFFFFFFDDDDDDDDGGGGEEEEEEEEEE

SEQ ID NO: 194 - protein, 3457 aa, Caenorhabditis elegans
MMMMMMMMRRRRRRRRRRREEEEEEEEEIIIIIIIIVVVVVVVHHHHHHHHHHIIIIIIIIQQQQQQQQQAAAAAGGGGQQQQQQQQQCCCCCCGGGGNNNNNNNNQQQQQQQQQIIIIIIIIGGGGSSSSSSKKKKKKKKKFFFFFFFFFFFWWWWWWWWWWWWWWEEEEEEEEEVVVVVVVIIIIIIIISSSSSSDDDDDDDDEEEEEEEEEHHHHHHHHHHGGGGIIIIIIIIDDDDDDDDPPPPPPPSSSSSSGGGGQQQQQQQQQYYYYYYYYYYYYVVVVVVVGGGGDDDDDDDDSSSSSSDDDDDDDDLLLLLLLLQQQQQQQQQLLLLLLLLEEEEEEEEERRRRRRRRRRRIIIIIIIINNNNNNNNVVVVVVVYYYYYYYYYYYYYYYYYYYYYYYYNNNNNNNNEEEEEEEEEAAAAAGGGGSSSSSSNNNNNNNNKKKKKKKKKYYYYYYYYYYYYVVVVVVVPPPPPPPRRRRRRRRRRRAAAAAVVVVVVVLLLLLLLLVVVVVVVDDDDDDDDLLLLLLLLEEEEEEEEEPPPPPPPGGGGTTTTTTTMMMMMMMMDDDDDDDDSSSSSSVVVVVVVRRRRRRRRRRRSSSSSSGGGGPPPPPPPFFFFFFFFFFFGGGGQQQQQQQQQLLLLLLLLFFFFFFFFFFFRRRRRRRRRRRPPPPPPPDDDDDDDDNNNNNNNNYYYYYYYYYYYYVVVVVVVFFFFFFFFFFFGGGGQQQQQQQQQSSSSSSGGGGAAAAAGGGGNNNNNNNNNNNNNNNNWWWWWWWWWWWWWWAAAAAKKKKKKKKKGGGGHHHHHHHHHHYYYYYYYYYYYYTTTTTTTEEEEEEEEEGGGGAAAAAEEEEEEEEELLLLLLLLVVVVVVVDDDDDDDDNNNNNNNNVVVVVVVLLLLLLLLDDDDDDDDVVVVVVVVVVVVVVRRRRRRRRRRRKKKKKKKKKEEEEEEEEEAAAAAEEEEEEEEESSSSSSTTTTTTTDDDDDDDDCCCCCCLLLLLLLLQQQQQQQQQGGGGFFFFFFFFFFFQQQQQQQQQLLLLLLLLTTTTTTTHHHHHHHHHHSSSSSSLLLLLLLLGGGGGGGGGGGGTTTTTTTGGGGSSSSSSGGGGMMMMMMMMGGGGTTTTTTTLLLLLLLLLLLLLLLLIIIIIIIISSSSSSKKKKKKKKKIIIIIIIIRRRRRRRRRRREEEEEEEEEEEEEEEEEEYYYYYYYYYYYYPPPPPPPDDDDDDDDRRRRRRRRRRRIIIIIIIIMMMMMMMMNNNNNNNNTTTTTTTFFFFFFFFFFFSSSSSSVVVVVVVVVVVVVVPPPPPPPSSSSSSPPPPPPPKKKKKKKKKVVVVVVVSSSSSSDDDDDDDDTTTTTTTVVVVVVVVVVVVVVEEEEEEEEEPPPPPPPYYYYYYYYYYYYNNNNNNNNAAAAATTTTTTTLLLLLLLLSSSSSSVVVVVVVHHHHHHHHHHQQQQQQQQQLLLLLLLLVVVVVVVEEEEEEEEENNNNNNNNTTTTTTTDDDDDDDDSSSSSSTTTTTTTFFFFFFFFFFFCCCCCCIIIIIIIIDDDDDDDDNNNNNNNNEEEEEEEEEAAAAALLLLLLLLYYYYYYYYYYYYDDDDDDDDIIIIIIIICCCCCCFFFFFFFFFFFRRRRRRRRRRRTTTTTTTLLLLLLLLKKKKKKKKKLLLLLLLLTTTTTTTTTTTTTTPPPPPPPTTTTTTTYYYYYYYYYYYYGGGGDDDDDDDDLLLLLLLLNNNNNNNNHHHHHHHHHHLLLLLLLLVVVVVVVSSSSSSAAAAATTTTTTTMMMMMMMMSSSSSSGGGGVVVVVVVTTTTTTTTTTTTTTCCCCCCLLLLLLLLRRRRRRRRRRRFFFFFFFFFFFPPPPPPPGGGGQQQQQQQQQLLLLLLLLNNNNNNNNAAAAADDDDDDDDLLLLLLLLRRRRRRRRRRRKKKKKKKKKLLLLLLLLAAAAAVVVVVVVNNNNNNNNMMMMMMMMVVVVVVVPPPPPPPFFFFFFFFFFFPPPPPPPRRRRRRRRRRRLLLLLLLLHHHHHHHHHHFFFFFFFFFFFFFFFFFFFFFFMMMMMMMMPPPPPPPGGGGFFFFFFFFFFFAAAAAPPPPPPPLLLLLLLLTTTTTTTSSSSSSRRRRRRRRRRRSSSSSSNNNNNNNNQQQQQQQQQQQQQQQQQQYYYYYYYYYYYYRRRRRRRRRRRAAAAAIIIIIIIITTTTTTTVVVVVVVPPPPPPPEEEEEEEEELLLLLLLLTTTTTTTQQQQQQQQQQQQQQQQQQCCCCCCFFFFFFFFFFFDDDDDDDDAAAAAKKKKKKKKKNNNNNNNNMMMMMMMMMMMMMMMMAAAAAAAAAACCCCCCDDDDDDDDPPPPPPPRRRRRRRRRRRHHHHHHHHHHGGGGRRRRRRRRRRRYYYYYYYYYYYYLLLLLLLLTTTTTTTAAAAAAAAAAAAAAAIIIIIIIIFFFFFFFFFFFRRRRRRRRRRRGGGGRRRRRRRRRRRMMMMMMMMSSSSSSMMMMMMMMKKKKKKKKKEEEEEEEEEVVVVVVVDDDDDDDDEEEEEEEEEQQQQQQQQQMMMMMMMMLLLLLLLLNNNNNNNNIIIIIIIIQQQQQQQQQNNNNNNNNKKKKKKKKKNNNNNNNNSSSSSSSSSSSSYYYYYYYYYYYYFFFFFFFFFFFVVVVVVVDDDDDDDDWWWWWWWWWWWWWWIIIIIIIIPPPPPPPNNNNNNNNNNNNNNNNVVVVVVVKKKKKKKKKTTTTTTTAAAAAVVVVVVVCCCCCCDDDDDDDDIIIIIIIIPPPPPPPPPPPPPPRRRRRRRRRRRGGGGLLLLLLLLKKKKKKKKKMMMMMMMMSSSSSSAAAAATTTTTTTFFFFFFFFFFFIIIIIIIIGGGGNNNNNNNNSSSSSSTTTTTTTAAAAAIIIIIIIIQQQQQQQQQEEEEEEEEELLLLLLLLFFFFFFFFFFFKKKKKKKKKRRRRRRRRRRRIIIIIIIISSSSSSEEEEEEEEEQQQQQQQQQFFFFFFFFFFFTTTTTTTAAAAAMMMMMMMMFFFFFFFFFFFRRRRRRRRRRRRRRRRRRRRRRKKKKKKKKKAAAAAFFFFFFFFFFFLLLLLLLLHHHHHHHHHHWWWWWWWWWWWWWWYYYYYYYYYYYYTTTTTTTGGGGEEEEEEEEEGGGGMMMMMMMMDDDDDDDDEEEEEEEEEMMMMMMMMEEEEEEEEEFFFFFFFFFFFTTTTTTTEEEEEEEEEAAAAAEEEEEEEEESSSSSSNNNNNNNNMMMMMMMMNNNNNNNNDDDDDDDDLLLLLLLLVVVVVVVSSSSSSEEEEEEEEEYYYYYYYYYYYYQQQQQQQQQQQQQQQQQQYYYYYYYYYYYYQQQQQQQQQEEEEEEEEEAAAAAAAAAAAAAAADDDDDDDDEEEEEEEEEDDDDDDDDAAAAAAAAAAEEEEEEEEEAAAAAFFFFFFFFFFFDDDDDDDDGGGGEEEEEEEEEE

SEQ ID NO: 195 - protein, 3486 aa, Gallus gallus
MMMMMMMMRRRRRRRRRRREEEEEEEEEIIIIIIIIVVVVVVVHHHHHHHHHHIIIIIIIIQQQQQQQQQAAAAAGGGGQQQQQQQQQCCCCCCGGGGNNNNNNNNQQQQQQQQQIIIIIIIIGGGGAAAAAKKKKKKKKKFFFFFFFFFFFWWWWWWWWWWWWWWEEEEEEEEEVVVVVVVIIIIIIIISSSSSSDDDDDDDDEEEEEEEEEHHHHHHHHHHGGGGIIIIIIIIDDDDDDDDPPPPPPPTTTTTTTGGGGTTTTTTTYYYYYYYYYYYYHHHHHHHHHHGGGGDDDDDDDDSSSSSSDDDDDDDDLLLLLLLLQQQQQQQQQLLLLLLLLDDDDDDDDRRRRRRRRRRRIIIIIIIISSSSSSVVVVVVVYYYYYYYYYYYYYYYYYYYYYYYYNNNNNNNNEEEEEEEEEAAAAATTTTTTTGGGGGGGGKKKKKKKKKYYYYYYYYYYYYVVVVVVVPPPPPPPRRRRRRRRRRRAAAAAIIIIIIIILLLLLLLLVVVVVVVDDDDDDDDLLLLLLLLEEEEEEEEEPPPPPPPGGGGTTTTTTTMMMMMMMMDDDDDDDDSSSSSSVVVVVVVRRRRRRRRRRRSSSSSSGGGGPPPPPPPFFFFFFFFFFFGGGGQQQQQQQQQIIIIIIIIFFFFFFFFFFFRRRRRRRRRRRPPPPPPPDDDDDDDDNNNNNNNNFFFFFFFFFFFVVVVVVVFFFFFFFFFFFGGGGQQQQQQQQQSSSSSSGGGGAAAAAGGGGNNNNNNNNNNNNNNNNWWWWWWWWWWWWWWAAAAAKKKKKKKKKGGGGHHHHHHHHHHYYYYYYYYYYYYTTTTTTTEEEEEEEEEGGGGAAAAAEEEEEEEEELLLLLLLLVVVVVVVDDDDDDDDSSSSSSVVVVVVVLLLLLLLLDDDDDDDDVVVVVVVVVVVVVVRRRRRRRRRRRKKKKKKKKKEEEEEEEEEAAAAAEEEEEEEEESSSSSSCCCCCCDDDDDDDDCCCCCCLLLLLLLLQQQQQQQQQGGGGFFFFFFFFFFFQQQQQQQQQLLLLLLLLTTTTTTTHHHHHHHHHHSSSSSSLLLLLLLLGGGGGGGGGGGGTTTTTTTGGGGSSSSSSGGGGMMMMMMMMGGGGTTTTTTTLLLLLLLLLLLLLLLLIIIIIIIISSSSSSKKKKKKKKKIIIIIIIIRRRRRRRRRRREEEEEEEEEEEEEEEEEEYYYYYYYYYYYYPPPPPPPDDDDDDDDRRRRRRRRRRRIIIIIIIIMMMMMMMMNNNNNNNNTTTTTTTFFFFFFFFFFFSSSSSSVVVVVVVVVVVVVVPPPPPPPSSSSSSPPPPPPPKKKKKKKKKVVVVVVVSSSSSSDDDDDDDDTTTTTTTVVVVVVVVVVVVVVEEEEEEEEEPPPPPPPYYYYYYYYYYYYNNNNNNNNAAAAATTTTTTTLLLLLLLLSSSSSSVVVVVVVHHHHHHHHHHQQQQQQQQQLLLLLLLLVVVVVVVEEEEEEEEENNNNNNNNTTTTTTTDDDDDDDDEEEEEEEEETTTTTTTYYYYYYYYYYYYCCCCCCIIIIIIIIDDDDDDDDNNNNNNNNEEEEEEEEEAAAAALLLLLLLLYYYYYYYYYYYYDDDDDDDDIIIIIIIICCCCCCFFFFFFFFFFFRRRRRRRRRRRTTTTTTTLLLLLLLLKKKKKKKKKLLLLLLLLTTTTTTTTTTTTTTPPPPPPPTTTTTTTYYYYYYYYYYYYGGGGDDDDDDDDLLLLLLLLNNNNNNNNHHHHHHHHHHLLLLLLLLVVVVVVVSSSSSSAAAAATTTTTTTMMMMMMMMSSSSSSGGGGVVVVVVVTTTTTTTTTTTTTTCCCCCCLLLLLLLLRRRRRRRRRRRFFFFFFFFFFFPPPPPPPGGGGQQQQQQQQQLLLLLLLLNNNNNNNNAAAAADDDDDDDDLLLLLLLLRRRRRRRRRRRKKKKKKKKKLLLLLLLLAAAAAVVVVVVVNNNNNNNNMMMMMMMMVVVVVVVPPPPPPPFFFFFFFFFFFPPPPPPPRRRRRRRRRRRLLLLLLLLHHHHHHHHHHFFFFFFFFFFFFFFFFFFFFFFMMMMMMMMPPPPPPPGGGGFFFFFFFFFFFAAAAAPPPPPPPLLLLLLLLTTTTTTTSSSSSSRRRRRRRRRRRGGGGSSSSSSQQQQQQQQQQQQQQQQQQYYYYYYYYYYYYRRRRRRRRRRRAAAAALLLLLLLLTTTTTTTVVVVVVVPPPPPPPEEEEEEEEELLLLLLLLTTTTTTTQQQQQQQQQQQQQQQQQQVVVVVVVFFFFFFFFFFFDDDDDDDDAAAAAKKKKKKKKKNNNNNNNNMMMMMMMMMMMMMMMMAAAAAAAAAACCCCCCDDDDDDDDPPPPPPPRRRRRRRRRRRHHHHHHHHHHGGGGRRRRRRRRRRRYYYYYYYYYYYYLLLLLLLLTTTTTTTVVVVVVVAAAAAAAAAAVVVVVVVFFFFFFFFFFFRRRRRRRRRRRGGGGRRRRRRRRRRRMMMMMMMMSSSSSSMMMMMMMMKKKKKKKKKEEEEEEEEEVVVVVVVDDDDDDDDEEEEEEEEEQQQQQQQQQMMMMMMMMLLLLLLLLNNNNNNNNVVVVVVVQQQQQQQQQNNNNNNNNKKKKKKKKKNNNNNNNNSSSSSSSSSSSSYYYYYYYYYYYYFFFFFFFFFFFVVVVVVVEEEEEEEEEWWWWWWWWWWWWWWIIIIIIIIPPPPPPPNNNNNNNNNNNNNNNNVVVVVVVKKKKKKKKKTTTTTTTAAAAAVVVVVVVCCCCCCDDDDDDDDIIIIIIIIPPPPPPPPPPPPPPRRRRRRRRRRRGGGGLLLLLLLLKKKKKKKKKMMMMMMMMAAAAAVVVVVVVTTTTTTTFFFFFFFFFFFIIIIIIIIGGGGNNNNNNNNSSSSSSTTTTTTTAAAAAIIIIIIIIQQQQQQQQQEEEEEEEEELLLLLLLLFFFFFFFFFFFKKKKKKKKKRRRRRRRRRRRIIIIIIIISSSSSSEEEEEEEEEQQQQQQQQQFFFFFFFFFFFTTTTTTTAAAAAMMMMMMMMFFFFFFFFFFFRRRRRRRRRRRRRRRRRRRRRRKKKKKKKKKAAAAAFFFFFFFFFFFLLLLLLLLHHHHHHHHHHWWWWWWWWWWWWWWYYYYYYYYYYYYTTTTTTTGGGGEEEEEEEEEGGGGMMMMMMMMDDDDDDDDEEEEEEEEEMMMMMMMMEEEEEEEEEFFFFFFFFFFFTTTTTTTEEEEEEEEEAAAAAEEEEEEEEESSSSSSNNNNNNNNMMMMMMMMNNNNNNNNDDDDDDDDLLLLLLLLVVVVVVVSSSSSSEEEEEEEEEYYYYYYYYYYYYQQQQQQQQQQQQQQQQQQYYYYYYYYYYYYQQQQQQQQQDDDDDDDDAAAAATTTTTTTAAAAAEEEEEEEEEEEEEEEEEEEEEEEEEEEEEEEEEEEEDDDDDDDDFFFFFFFFFFFGGGGEEEEEEEEEEEEEEEEEEAAAAAEEEEEEEEEEEEEEEEEEEEEEEEEEEAAAAAA

SEQ ID NO: 196 - protein, 3507 aa, Zea mays
MMMMMMMMRRRRRRRRRRREEEEEEEEEIIIIIIIILLLLLLLLHHHHHHHHHHIIIIIIIIQQQQQQQQQGGGGGGGGQQQQQQQQQCCCCCCGGGGNNNNNNNNQQQQQQQQQIIIIIIIIGGGGAAAAAKKKKKKKKKFFFFFFFFFFFWWWWWWWWWWWWWWEEEEEEEEEVVVVVVVIIIIIIIICCCCCCDDDDDDDDEEEEEEEEEHHHHHHHHHHGGGGIIIIIIIIDDDDDDDDHHHHHHHHHHTTTTTTTGGGGKKKKKKKKKYYYYYYYYYYYYAAAAAGGGGDDDDDDDDSSSSSSDDDDDDDDLLLLLLLLQQQQQQQQQLLLLLLLLEEEEEEEEERRRRRRRRRRRIIIIIIIINNNNNNNNVVVVVVVYYYYYYYYYYYYYYYYYYYYYYYYNNNNNNNNEEEEEEEEEAAAAASSSSSSGGGGGGGGRRRRRRRRRRRFFFFFFFFFFFVVVVVVVPPPPPPPRRRRRRRRRRRAAAAAVVVVVVVLLLLLLLLMMMMMMMMDDDDDDDDLLLLLLLLEEEEEEEEEPPPPPPPGGGGTTTTTTTMMMMMMMMDDDDDDDDSSSSSSVVVVVVVRRRRRRRRRRRSSSSSSGGGGPPPPPPPFFFFFFFFFFFGGGGQQQQQQQQQIIIIIIIIFFFFFFFFFFFRRRRRRRRRRRPPPPPPPDDDDDDDDNNNNNNNNFFFFFFFFFFFVVVVVVVFFFFFFFFFFFGGGGQQQQQQQQQSSSSSSGGGGAAAAAGGGGNNNNNNNNNNNNNNNNWWWWWWWWWWWWWWAAAAAKKKKKKKKKGGGGHHHHHHHHHHYYYYYYYYYYYYTTTTTTTEEEEEEEEEGGGGAAAAAEEEEEEEEELLLLLLLLIIIIIIIIDDDDDDDDSSSSSSVVVVVVVLLLLLLLLDDDDDDDDVVVVVVVVVVVVVVRRRRRRRRRRRKKKKKKKKKEEEEEEEEEAAAAAEEEEEEEEENNNNNNNNCCCCCCDDDDDDDDCCCCCCLLLLLLLLQQQQQQQQQGGGGFFFFFFFFFFFQQQQQQQQQVVVVVVVCCCCCCHHHHHHHHHHSSSSSSLLLLLLLLGGGGGGGGGGGGTTTTTTTGGGGSSSSSSGGGGMMMMMMMMGGGGTTTTTTTLLLLLLLLLLLLLLLLIIIIIIIISSSSSSKKKKKKKKKIIIIIIIIRRRRRRRRRRREEEEEEEEEEEEEEEEEEYYYYYYYYYYYYPPPPPPPDDDDDDDDRRRRRRRRRRRMMMMMMMMMMMMMMMMLLLLLLLLTTTTTTTFFFFFFFFFFFSSSSSSVVVVVVVFFFFFFFFFFFPPPPPPPSSSSSSPPPPPPPKKKKKKKKKVVVVVVVSSSSSSDDDDDDDDTTTTTTTVVVVVVVVVVVVVVEEEEEEEEEPPPPPPPYYYYYYYYYYYYNNNNNNNNAAAAATTTTTTTLLLLLLLLSSSSSSVVVVVVVHHHHHHHHHHQQQQQQQQQLLLLLLLLVVVVVVVEEEEEEEEENNNNNNNNAAAAADDDDDDDDEEEEEEEEECCCCCCMMMMMMMMVVVVVVVLLLLLLLLDDDDDDDDNNNNNNNNEEEEEEEEEAAAAALLLLLLLLYYYYYYYYYYYYDDDDDDDDIIIIIIIICCCCCCFFFFFFFFFFFRRRRRRRRRRRTTTTTTTLLLLLLLLKKKKKKKKKLLLLLLLLAAAAATTTTTTTPPPPPPPTTTTTTTFFFFFFFFFFFGGGGDDDDDDDDLLLLLLLLNNNNNNNNHHHHHHHHHHLLLLLLLLIIIIIIIISSSSSSAAAAATTTTTTTMMMMMMMMSSSSSSGGGGVVVVVVVTTTTTTTCCCCCCCCCCCCLLLLLLLLRRRRRRRRRRRFFFFFFFFFFFPPPPPPPGGGGQQQQQQQQQLLLLLLLLNNNNNNNNSSSSSSDDDDDDDDLLLLLLLLRRRRRRRRRRRKKKKKKKKKLLLLLLLLAAAAAVVVVVVVNNNNNNNNLLLLLLLLIIIIIIIIPPPPPPPFFFFFFFFFFFPPPPPPPRRRRRRRRRRRLLLLLLLLHHHHHHHHHHFFFFFFFFFFFFFFFFFFFFFFMMMMMMMMVVVVVVVGGGGFFFFFFFFFFFAAAAAPPPPPPPLLLLLLLLTTTTTTTSSSSSSRRRRRRRRRRRGGGGSSSSSSQQQQQQQQQQQQQQQQQQYYYYYYYYYYYYRRRRRRRRRRRAAAAALLLLLLLLTTTTTTTVVVVVVVPPPPPPPEEEEEEEEELLLLLLLLTTTTTTTQQQQQQQQQQQQQQQQQQMMMMMMMMWWWWWWWWWWWWWWDDDDDDDDSSSSSSKKKKKKKKKNNNNNNNNMMMMMMMMMMMMMMMMCCCCCCAAAAAAAAAADDDDDDDDPPPPPPPRRRRRRRRRRRHHHHHHHHHHGGGGRRRRRRRRRRRYYYYYYYYYYYYLLLLLLLLTTTTTTTAAAAASSSSSSAAAAAMMMMMMMMFFFFFFFFFFFRRRRRRRRRRRGGGGKKKKKKKKKMMMMMMMMSSSSSSTTTTTTTKKKKKKKKKEEEEEEEEEVVVVVVVDDDDDDDDEEEEEEEEEQQQQQQQQQMMMMMMMMLLLLLLLLNNNNNNNNVVVVVVVQQQQQQQQQNNNNNNNNKKKKKKKKKNNNNNNNNSSSSSSSSSSSSYYYYYYYYYYYYFFFFFFFFFFFVVVVVVVEEEEEEEEEWWWWWWWWWWWWWWIIIIIIIIPPPPPPPNNNNNNNNNNNNNNNNVVVVVVVKKKKKKKKKSSSSSSSSSSSSVVVVVVVCCCCCCDDDDDDDDIIIIIIIIPPPPPPPPPPPPPPIIIIIIIIGGGGLLLLLLLLKKKKKKKKKMMMMMMMMSSSSSSSSSSSSTTTTTTTFFFFFFFFFFFVVVVVVVGGGGNNNNNNNNSSSSSSTTTTTTTSSSSSSIIIIIIIIQQQQQQQQQEEEEEEEEEMMMMMMMMFFFFFFFFFFFRRRRRRRRRRRRRRRRRRRRRRVVVVVVVSSSSSSEEEEEEEEEQQQQQQQQQFFFFFFFFFFFTTTTTTTAAAAAMMMMMMMMFFFFFFFFFFFRRRRRRRRRRRRRRRRRRRRRRKKKKKKKKKAAAAAFFFFFFFFFFFLLLLLLLLHHHHHHHHHHWWWWWWWWWWWWWWYYYYYYYYYYYYTTTTTTTGGGGEEEEEEEEEGGGGMMMMMMMMDDDDDDDDEEEEEEEEEMMMMMMMMEEEEEEEEEFFFFFFFFFFFTTTTTTTEEEEEEEEEAAAAAEEEEEEEEESSSSSSNNNNNNNNMMMMMMMMNNNNNNNNDDDDDDDDLLLLLLLLVVVVVVVAAAAAEEEEEEEEEYYYYYYYYYYYYQQQQQQQQQQQQQQQQQQYYYYYYYYYYYYQQQQQQQQQDDDDDDDDAAAAATTTTTTTAAAAAEEEEEEEEEDDDDDDDDEEEEEEEEEEEEEEEEEEYYYYYYYYYYYYEEEEEEEEEEEEEEEEEEEEEEEEEEEEEEEEEEEEEEEEEEEEEEEEEEEEEEEEEEEEEEEEEEEEEEEEEEEEEEEEETTTTTTTT

SEQ ID NO: 197 - protein, 3544 aa, Arabidopsis thaliana
MMMMMMMMRRRRRRRRRRREEEEEEEEEIIIIIIIILLLLLLLLHHHHHHHHHHIIIIIIIIQQQQQQQQQGGGGGGGGQQQQQQQQQCCCCCCGGGGNNNNNNNNQQQQQQQQQIIIIIIIIGGGGAAAAAKKKKKKKKKFFFFFFFFFFFWWWWWWWWWWWWWWEEEEEEEEEVVVVVVVVVVVVVVCCCCCCAAAAAEEEEEEEEEHHHHHHHHHHGGGGIIIIIIIIDDDDDDDDSSSSSSTTTTTTTGGGGRRRRRRRRRRRYYYYYYYYYYYYQQQQQQQQQGGGGEEEEEEEEENNNNNNNNDDDDDDDDLLLLLLLLQQQQQQQQQLLLLLLLLEEEEEEEEERRRRRRRRRRRVVVVVVVNNNNNNNNVVVVVVVYYYYYYYYYYYYYYYYYYYYYYYYNNNNNNNNEEEEEEEEEAAAAASSSSSSCCCCCCGGGGRRRRRRRRRRRFFFFFFFFFFFVVVVVVVPPPPPPPRRRRRRRRRRRAAAAAVVVVVVVLLLLLLLLMMMMMMMMDDDDDDDDLLLLLLLLEEEEEEEEEPPPPPPPGGGGTTTTTTTMMMMMMMMDDDDDDDDSSSSSSVVVVVVVRRRRRRRRRRRSSSSSSGGGGPPPPPPPYYYYYYYYYYYYGGGGQQQQQQQQQIIIIIIIIFFFFFFFFFFFRRRRRRRRRRRPPPPPPPDDDDDDDDNNNNNNNNFFFFFFFFFFFVVVVVVVFFFFFFFFFFFGGGGQQQQQQQQQSSSSSSGGGGAAAAAGGGGNNNNNNNNNNNNNNNNWWWWWWWWWWWWWWAAAAAKKKKKKKKKGGGGHHHHHHHHHHYYYYYYYYYYYYTTTTTTTEEEEEEEEEGGGGAAAAAEEEEEEEEELLLLLLLLIIIIIIIIDDDDDDDDSSSSSSVVVVVVVLLLLLLLLDDDDDDDDVVVVVVVVVVVVVVRRRRRRRRRRRKKKKKKKKKEEEEEEEEERRRRRRRRRRREEEEEEEEENNNNNNNNCCCCCCDDDDDDDDCCCCCCLLLLLLLLQQQQQQQQQGGGGFFFFFFFFFFFQQQQQQQQQVVVVVVVCCCCCCHHHHHHHHHHSSSSSSLLLLLLLLGGGGGGGGGGGGTTTTTTTGGGGSSSSSSGGGGMMMMMMMMGGGGTTTTTTTLLLLLLLLLLLLLLLLIIIIIIIISSSSSSKKKKKKKKKIIIIIIIIRRRRRRRRRRREEEEEEEEEEEEEEEEEEYYYYYYYYYYYYPPPPPPPDDDDDDDDRRRRRRRRRRRMMMMMMMMIIIIIIIIVVVVVVVTTTTTTTFFFFFFFFFFFSSSSSSVVVVVVVIIIIIIIIPPPPPPPSSSSSSPPPPPPPKKKKKKKKKVVVVVVVSSSSSSDDDDDDDDTTTTTTTVVVVVVVVVVVVVVEEEEEEEEEPPPPPPPYYYYYYYYYYYYNNNNNNNNAAAAATTTTTTTLLLLLLLLSSSSSSVVVVVVVHHHHHHHHHHQQQQQQQQQLLLLLLLLVVVVVVVEEEEEEEEENNNNNNNNAAAAADDDDDDDDEEEEEEEEECCCCCCMMMMMMMMVVVVVVVLLLLLLLLDDDDDDDDNNNNNNNNEEEEEEEEEAAAAALLLLLLLLYYYYYYYYYYYYDDDDDDDDIIIIIIIICCCCCCFFFFFFFFFFFRRRRRRRRRRRTTTTTTTLLLLLLLLKKKKKKKKKLLLLLLLLTTTTTTTTTTTTTTPPPPPPPSSSSSSFFFFFFFFFFFGGGGDDDDDDDDLLLLLLLLNNNNNNNNHHHHHHHHHHLLLLLLLLIIIIIIIISSSSSSAAAAATTTTTTTMMMMMMMMSSSSSSGGGGVVVVVVVTTTTTTTCCCCCCCCCCCCLLLLLLLLRRRRRRRRRRRFFFFFFFFFFFPPPPPPPGGGGQQQQQQQQQLLLLLLLLNNNNNNNNSSSSSSDDDDDDDDLLLLLLLLRRRRRRRRRRRKKKKKKKKKLLLLLLLLAAAAAVVVVVVVNNNNNNNNLLLLLLLLIIIIIIIIPPPPPPPFFFFFFFFFFFPPPPPPPRRRRRRRRRRRLLLLLLLLHHHHHHHHHHFFFFFFFFFFFFFFFFFFFFFFMMMMMMMMVVVVVVVGGGGFFFFFFFFFFFAAAAAPPPPPPPLLLLLLLLTTTTTTTSSSSSSRRRRRRRRRRRGGGGSSSSSSQQQQQQQQQQQQQQQQQQYYYYYYYYYYYYRRRRRRRRRRRAAAAALLLLLLLLTTTTTTTVVVVVVVPPPPPPPEEEEEEEEELLLLLLLLTTTTTTTQQQQQQQQQQQQQQQQQQMMMMMMMMWWWWWWWWWWWWWWDDDDDDDDAAAAAKKKKKKKKKNNNNNNNNMMMMMMMMMMMMMMMMCCCCCCAAAAAAAAAADDDDDDDDPPPPPPPRRRRRRRRRRRHHHHHHHHHHGGGGRRRRRRRRRRRYYYYYYYYYYYYLLLLLLLLTTTTTTTAAAAASSSSSSAAAAAMMMMMMMMFFFFFFFFFFFRRRRRRRRRRRGGGGKKKKKKKKKMMMMMMMMSSSSSSTTTTTTTKKKKKKKKKEEEEEEEEEVVVVVVVDDDDDDDDEEEEEEEEEQQQQQQQQQMMMMMMMMIIIIIIIINNNNNNNNVVVVVVVQQQQQQQQQNNNNNNNNKKKKKKKKKNNNNNNNNSSSSSSSSSSSSYYYYYYYYYYYYFFFFFFFFFFFVVVVVVVEEEEEEEEEWWWWWWWWWWWWWWIIIIIIIIPPPPPPPNNNNNNNNNNNNNNNNVVVVVVVKKKKKKKKKSSSSSSTTTTTTTVVVVVVVCCCCCCDDDDDDDDIIIIIIIIPPPPPPPPPPPPPPTTTTTTTGGGGLLLLLLLLKKKKKKKKKMMMMMMMMAAAAASSSSSSTTTTTTTFFFFFFFFFFFIIIIIIIIGGGGNNNNNNNNSSSSSSTTTTTTTSSSSSSIIIIIIIIQQQQQQQQQEEEEEEEEEMMMMMMMMFFFFFFFFFFFRRRRRRRRRRRRRRRRRRRRRRVVVVVVVSSSSSSEEEEEEEEEQQQQQQQQQFFFFFFFFFFFTTTTTTTAAAAAMMMMMMMMFFFFFFFFFFFRRRRRRRRRRRRRRRRRRRRRRKKKKKKKKKAAAAAFFFFFFFFFFFLLLLLLLLHHHHHHHHHHWWWWWWWWWWWWWWYYYYYYYYYYYYTTTTTTTGGGGEEEEEEEEEGGGGMMMMMMMMDDDDDDDDEEEEEEEEEMMMMMMMMEEEEEEEEEFFFFFFFFFFFTTTTTTTEEEEEEEEEAAAAAEEEEEEEEESSSSSSNNNNNNNNMMMMMMMMNNNNNNNNDDDDDDDDLLLLLLLLVVVVVVVSSSSSSEEEEEEEEEYYYYYYYYYYYYQQQQQQQQQQQQQQQQQQYYYYYYYYYYYYQQQQQQQQQDDDDDDDDAAAAATTTTTTTAAAAADDDDDDDDEEEEEEEEEEEEEEEEEEEEEEEEEEEGGGGYYYYYYYYYYYYEEEEEEEEEYYYYYYYYYYYYEEEEEEEEEEEEEEEEEEDDDDDDDDEEEEEEEEEVVVVVVVEEEEEEEEEVVVVVVVQQQQQQQQQEEEEEEEEEEEEEEEEEEQQQQQQQQQQ

SEQ ID NO: 198 - protein, 3495 aa, Zea mays
MMMMMMMMRRRRRRRRRRREEEEEEEEEIIIIIIIILLLLLLLLHHHHHHHHHHIIIIIIIIQQQQQQQQQGGGGGGGGQQQQQQQQQCCCCCCGGGGNNNNNNNNQQQQQQQQQIIIIIIIIGGGGSSSSSSKKKKKKKKKFFFFFFFFFFFWWWWWWWWWWWWWWEEEEEEEEEVVVVVVVVVVVVVVCCCCCCDDDDDDDDEEEEEEEEEHHHHHHHHHHGGGGIIIIIIIIDDDDDDDDPPPPPPPTTTTTTTGGGGRRRRRRRRRRRYYYYYYYYYYYYVVVVVVVGGGGTTTTTTTSSSSSSDDDDDDDDLLLLLLLLQQQQQQQQQLLLLLLLLEEEEEEEEERRRRRRRRRRRVVVVVVVNNNNNNNNVVVVVVVYYYYYYYYYYYYYYYYYYYYYYYYNNNNNNNNEEEEEEEEEAAAAASSSSSSCCCCCCGGGGRRRRRRRRRRRFFFFFFFFFFFVVVVVVVPPPPPPPGGGGAAAAAVVVVVVVLLLLLLLLMMMMMMMMDDDDDDDDLLLLLLLLEEEEEEEEEPPPPPPPGGGGTTTTTTTMMMMMMMMDDDDDDDDSSSSSSVVVVVVVRRRRRRRRRRRTTTTTTTGGGGPPPPPPPYYYYYYYYYYYYGGGGQQQQQQQQQIIIIIIIIFFFFFFFFFFFRRRRRRRRRRRPPPPPPPDDDDDDDDNNNNNNNNFFFFFFFFFFFVVVVVVVFFFFFFFFFFFGGGGQQQQQQQQQSSSSSSGGGGAAAAAGGGGNNNNNNNNNNNNNNNNWWWWWWWWWWWWWWAAAAAKKKKKKKKKGGGGHHHHHHHHHHYYYYYYYYYYYYTTTTTTTEEEEEEEEEGGGGAAAAAEEEEEEEEELLLLLLLLIIIIIIIIDDDDDDDDSSSSSSVVVVVVVLLLLLLLLDDDDDDDDVVVVVVVVVVVVVVRRRRRRRRRRRKKKKKKKKKEEEEEEEEEAAAAAEEEEEEEEENNNNNNNNCCCCCCDDDDDDDDCCCCCCLLLLLLLLQQQQQQQQQGGGGFFFFFFFFFFFQQQQQQQQQVVVVVVVCCCCCCHHHHHHHHHHSSSSSSLLLLLLLLGGGGGGGGGGGGTTTTTTTGGGGSSSSSSGGGGMMMMMMMMGGGGTTTTTTTLLLLLLLLLLLLLLLLIIIIIIIISSSSSSKKKKKKKKKIIIIIIIIRRRRRRRRRRREEEEEEEEEEEEEEEEEEYYYYYYYYYYYYPPPPPPPDDDDDDDDRRRRRRRRRRRMMMMMMMMMMMMMMMMLLLLLLLLTTTTTTTFFFFFFFFFFFSSSSSSVVVVVVVFFFFFFFFFFFPPPPPPPSSSSSSPPPPPPPKKKKKKKKKVVVVVVVSSSSSSDDDDDDDDTTTTTTTVVVVVVVVVVVVVVEEEEEEEEEPPPPPPPYYYYYYYYYYYYNNNNNNNNAAAAATTTTTTTLLLLLLLLSSSSSSVVVVVVVHHHHHHHHHHQQQQQQQQQLLLLLLLLVVVVVVVEEEEEEEEENNNNNNNNAAAAADDDDDDDDEEEEEEEEECCCCCCMMMMMMMMVVVVVVVLLLLLLLLDDDDDDDDNNNNNNNNEEEEEEEEEAAAAALLLLLLLLYYYYYYYYYYYYDDDDDDDDIIIIIIIICCCCCCFFFFFFFFFFFRRRRRRRRRRRTTTTTTTLLLLLLLLKKKKKKKKKLLLLLLLLTTTTTTTTTTTTTTPPPPPPPSSSSSSFFFFFFFFFFFGGGGDDDDDDDDLLLLLLLLNNNNNNNNHHHHHHHHHHLLLLLLLLIIIIIIIISSSSSSAAAAATTTTTTTMMMMMMMMSSSSSSGGGGVVVVVVVTTTTTTTCCCCCCCCCCCCLLLLLLLLRRRRRRRRRRRFFFFFFFFFFFPPPPPPPGGGGQQQQQQQQQLLLLLLLLNNNNNNNNSSSSSSDDDDDDDDLLLLLLLLRRRRRRRRRRRKKKKKKKKKLLLLLLLLAAAAAVVVVVVVNNNNNNNNLLLLLLLLIIIIIIIIPPPPPPPFFFFFFFFFFFPPPPPPPRRRRRRRRRRRLLLLLLLLHHHHHHHHHHFFFFFFFFFFFFFFFFFFFFFFMMMMMMMMVVVVVVVGGGGFFFFFFFFFFFAAAAAPPPPPPPLLLLLLLLTTTTTTTSSSSSSRRRRRRRRRRRGGGGSSSSSSQQQQQQQQQQQQQQQQQQYYYYYYYYYYYYRRRRRRRRRRRAAAAALLLLLLLLTTTTTTTVVVVVVVPPPPPPPEEEEEEEEELLLLLLLLTTTTTTTQQQQQQQQQQQQQQQQQQMMMMMMMMWWWWWWWWWWWWWWDDDDDDDDAAAAAKKKKKKKKKNNNNNNNNMMMMMMMMMMMMMMMMCCCCCCAAAAAAAAAADDDDDDDDPPPPPPPRRRRRRRRRRRHHHHHHHHHHGGGGRRRRRRRRRRRYYYYYYYYYYYYLLLLLLLLTTTTTTTAAAAASSSSSSAAAAAMMMMMMMMFFFFFFFFFFFRRRRRRRRRRRGGGGKKKKKKKKKMMMMMMMMSSSSSSTTTTTTTKKKKKKKKKEEEEEEEEEVVVVVVVDDDDDDDDEEEEEEEEEQQQQQQQQQMMMMMMMMIIIIIIIINNNNNNNNVVVVVVVQQQQQQQQQNNNNNNNNKKKKKKKKKNNNNNNNNSSSSSSSSSSSSYYYYYYYYYYYYFFFFFFFFFFFVVVVVVVEEEEEEEEEWWWWWWWWWWWWWWIIIIIIIIPPPPPPPNNNNNNNNNNNNNNNNVVVVVVVKKKKKKKKKSSSSSSSSSSSSVVVVVVVCCCCCCDDDDDDDDIIIIIIIIPPPPPPPPPPPPPPRRRRRRRRRRRGGGGLLLLLLLLSSSSSSMMMMMMMMAAAAASSSSSSTTTTTTTFFFFFFFFFFFIIIIIIIIGGGGNNNNNNNNSSSSSSTTTTTTTSSSSSSIIIIIIIIQQQQQQQQQEEEEEEEEEMMMMMMMMFFFFFFFFFFFRRRRRRRRRRRRRRRRRRRRRRVVVVVVVSSSSSSEEEEEEEEEQQQQQQQQQFFFFFFFFFFFTTTTTTTAAAAAMMMMMMMMFFFFFFFFFFFRRRRRRRRRRRRRRRRRRRRRRKKKKKKKKKAAAAAFFFFFFFFFFFLLLLLLLLHHHHHHHHHHWWWWWWWWWWWWWWYYYYYYYYYYYYTTTTTTTGGGGEEEEEEEEEGGGGMMMMMMMMDDDDDDDDEEEEEEEEEMMMMMMMMEEEEEEEEEFFFFFFFFFFFTTTTTTTEEEEEEEEEAAAAAEEEEEEEEESSSSSSNNNNNNNNMMMMMMMMNNNNNNNNDDDDDDDDLLLLLLLLVVVVVVVSSSSSSEEEEEEEEEYYYYYYYYYYYYQQQQQQQQQQQQQQQQQQYYYYYYYYYYYYQQQQQQQQQDDDDDDDDAAAAATTTTTTTAAAAADDDDDDDDEEEEEEEEEEEEEEEEEEAAAAAEEEEEEEEEYYYYYYYYYYYYEEEEEEEEEDDDDDDDDEEEEEEEEEEEEEEEEEEAAAAAIIIIIIIIQQQQQQQQQDDDDDDDDEEEEEEEEEE

SEQ ID NO: 199 - protein, 3473 aa, Arabidopsis thaliana
MMMMMMMMRRRRRRRRRRREEEEEEEEEIIIIIIIILLLLLLLLHHHHHHHHHHIIIIIIIIQQQQQQQQQGGGGGGGGQQQQQQQQQCCCCCCGGGGNNNNNNNNQQQQQQQQQIIIIIIIIGGGGAAAAAKKKKKKKKKFFFFFFFFFFFWWWWWWWWWWWWWWEEEEEEEEEVVVVVVVIIIIIIIICCCCCCGGGGEEEEEEEEEHHHHHHHHHHGGGGIIIIIIIIDDDDDDDDQQQQQQQQQTTTTTTTGGGGQQQQQQQQQSSSSSSCCCCCCGGGGDDDDDDDDTTTTTTTDDDDDDDDLLLLLLLLQQQQQQQQQLLLLLLLLEEEEEEEEERRRRRRRRRRRIIIIIIIINNNNNNNNVVVVVVVYYYYYYYYYYYYFFFFFFFFFFFNNNNNNNNEEEEEEEEEAAAAASSSSSSGGGGGGGGKKKKKKKKKYYYYYYYYYYYYVVVVVVVPPPPPPPRRRRRRRRRRRAAAAAVVVVVVVLLLLLLLLMMMMMMMMDDDDDDDDLLLLLLLLEEEEEEEEEPPPPPPPGGGGTTTTTTTMMMMMMMMDDDDDDDDSSSSSSLLLLLLLLRRRRRRRRRRRSSSSSSGGGGPPPPPPPFFFFFFFFFFFGGGGQQQQQQQQQIIIIIIIIFFFFFFFFFFFRRRRRRRRRRRPPPPPPPDDDDDDDDNNNNNNNNFFFFFFFFFFFVVVVVVVFFFFFFFFFFFGGGGQQQQQQQQQSSSSSSGGGGAAAAAGGGGNNNNNNNNNNNNNNNNWWWWWWWWWWWWWWAAAAAKKKKKKKKKGGGGHHHHHHHHHHYYYYYYYYYYYYTTTTTTTEEEEEEEEEGGGGAAAAAEEEEEEEEELLLLLLLLIIIIIIIIDDDDDDDDSSSSSSVVVVVVVLLLLLLLLDDDDDDDDVVVVVVVVVVVVVVRRRRRRRRRRRKKKKKKKKKEEEEEEEEEAAAAAEEEEEEEEENNNNNNNNCCCCCCDDDDDDDDCCCCCCLLLLLLLLQQQQQQQQQGGGGFFFFFFFFFFFQQQQQQQQQVVVVVVVCCCCCCHHHHHHHHHHSSSSSSLLLLLLLLGGGGGGGGGGGGTTTTTTTGGGGSSSSSSGGGGMMMMMMMMGGGGTTTTTTTLLLLLLLLLLLLLLLLIIIIIIIISSSSSSKKKKKKKKKIIIIIIIIRRRRRRRRRRREEEEEEEEEEEEEEEEEEYYYYYYYYYYYYPPPPPPPDDDDDDDDRRRRRRRRRRRMMMMMMMMMMMMMMMMMMMMMMMMTTTTTTTFFFFFFFFFFFSSSSSSVVVVVVVFFFFFFFFFFFPPPPPPPSSSSSSPPPPPPPKKKKKKKKKVVVVVVVSSSSSSDDDDDDDDTTTTTTTVVVVVVVVVVVVVVEEEEEEEEEPPPPPPPYYYYYYYYYYYYNNNNNNNNAAAAATTTTTTTLLLLLLLLSSSSSSVVVVVVVHHHHHHHHHHQQQQQQQQQLLLLLLLLVVVVVVVEEEEEEEEENNNNNNNNAAAAADDDDDDDDEEEEEEEEECCCCCCMMMMMMMMVVVVVVVLLLLLLLLDDDDDDDDNNNNNNNNEEEEEEEEEAAAAALLLLLLLLYYYYYYYYYYYYDDDDDDDDIIIIIIIICCCCCCFFFFFFFFFFFRRRRRRRRRRRTTTTTTTLLLLLLLLKKKKKKKKKLLLLLLLLAAAAANNNNNNNNPPPPPPPTTTTTTTFFFFFFFFFFFGGGGDDDDDDDDLLLLLLLLNNNNNNNNHHHHHHHHHHLLLLLLLLIIIIIIIISSSSSSAAAAATTTTTTTMMMMMMMMSSSSSSGGGGVVVVVVVTTTTTTTCCCCCCCCCCCCLLLLLLLLRRRRRRRRRRRFFFFFFFFFFFPPPPPPPGGGGQQQQQQQQQLLLLLLLLNNNNNNNNSSSSSSDDDDDDDDLLLLLLLLRRRRRRRRRRRKKKKKKKKKLLLLLLLLAAAAAVVVVVVVNNNNNNNNLLLLLLLLIIIIIIIIPPPPPPPFFFFFFFFFFFPPPPPPPRRRRRRRRRRRLLLLLLLLHHHHHHHHHHFFFFFFFFFFFFFFFFFFFFFFMMMMMMMMVVVVVVVGGGGFFFFFFFFFFFAAAAAPPPPPPPLLLLLLLLTTTTTTTSSSSSSRRRRRRRRRRRGGGGSSSSSSQQQQQQQQQQQQQQQQQQYYYYYYYYYYYYSSSSSSAAAAALLLLLLLLSSSSSSVVVVVVVPPPPPPPEEEEEEEEELLLLLLLLTTTTTTTQQQQQQQQQQQQQQQQQQMMMMMMMMWWWWWWWWWWWWWWDDDDDDDDAAAAAKKKKKKKKKNNNNNNNNMMMMMMMMMMMMMMMMCCCCCCAAAAAAAAAADDDDDDDDPPPPPPPRRRRRRRRRRRHHHHHHHHHHGGGGRRRRRRRRRRRYYYYYYYYYYYYLLLLLLLLTTTTTTTAAAAASSSSSSAAAAAVVVVVVVFFFFFFFFFFFRRRRRRRRRRRGGGGKKKKKKKKKMMMMMMMMSSSSSSTTTTTTTKKKKKKKKKEEEEEEEEEVVVVVVVDDDDDDDDEEEEEEEEEQQQQQQQQQMMMMMMMMMMMMMMMMNNNNNNNNVVVVVVVQQQQQQQQQNNNNNNNNKKKKKKKKKNNNNNNNNSSSSSSSSSSSSYYYYYYYYYYYYFFFFFFFFFFFVVVVVVVEEEEEEEEEWWWWWWWWWWWWWWIIIIIIIIPPPPPPPNNNNNNNNNNNNNNNNVVVVVVVKKKKKKKKKSSSSSSSSSSSSVVVVVVVCCCCCCDDDDDDDDIIIIIIIIAAAAAPPPPPPPTTTTTTTGGGGLLLLLLLLKKKKKKKKKMMMMMMMMAAAAASSSSSSTTTTTTTFFFFFFFFFFFIIIIIIIIGGGGNNNNNNNNSSSSSSTTTTTTTSSSSSSIIIIIIIIQQQQQQQQQEEEEEEEEEMMMMMMMMFFFFFFFFFFFRRRRRRRRRRRRRRRRRRRRRRVVVVVVVSSSSSSEEEEEEEEEQQQQQQQQQFFFFFFFFFFFTTTTTTTAAAAAMMMMMMMMFFFFFFFFFFFRRRRRRRRRRRRRRRRRRRRRRKKKKKKKKKAAAAAFFFFFFFFFFFLLLLLLLLHHHHHHHHHHWWWWWWWWWWWWWWYYYYYYYYYYYYTTTTTTTGGGGEEEEEEEEEGGGGMMMMMMMMDDDDDDDDEEEEEEEEEMMMMMMMMEEEEEEEEEFFFFFFFFFFFTTTTTTTEEEEEEEEEAAAAAEEEEEEEEESSSSSSNNNNNNNNMMMMMMMMNNNNNNNNDDDDDDDDLLLLLLLLVVVVVVVAAAAAEEEEEEEEEYYYYYYYYYYYYQQQQQQQQQQQQQQQQQQYYYYYYYYYYYYQQQQQQQQQDDDDDDDDAAAAATTTTTTTVVVVVVVGGGGEEEEEEEEEEEEEEEEEEEEEEEEEEEYYYYYYYYYYYYEEEEEEEEEEEEEEEEEEDDDDDDDDEEEEEEEEEEEEEEEEEEEEEEEEEEEEEEEEEEEEEEEEEEEEEAAAAAA

SEQ ID NO: 200 - protein, 3488 aa, Achlya klebsiana
MMMMMMMMRRRRRRRRRRREEEEEEEEELLLLLLLLVVVVVVVHHHHHHHHHHIIIIIIIIQQQQQQQQQGGGGGGGGQQQQQQQQQCCCCCCGGGGNNNNNNNNQQQQQQQQQIIIIIIIIGGGGAAAAAKKKKKKKKKFFFFFFFFFFFWWWWWWWWWWWWWWEEEEEEEEEVVVVVVVIIIIIIIISSSSSSDDDDDDDDEEEEEEEEEHHHHHHHHHHGGGGVVVVVVVDDDDDDDDPPPPPPPTTTTTTTGGGGSSSSSSYYYYYYYYYYYYHHHHHHHHHHGGGGDDDDDDDDSSSSSSDDDDDDDDLLLLLLLLQQQQQQQQQLLLLLLLLEEEEEEEEERRRRRRRRRRRIIIIIIIINNNNNNNNVVVVVVVYYYYYYYYYYYYYYYYYYYYYYYYNNNNNNNNEEEEEEEEEAAAAATTTTTTTGGGGTTTTTTTYYYYYYYYYYYYVVVVVVVPPPPPPPRRRRRRRRRRRAAAAAIIIIIIIILLLLLLLLMMMMMMMMDDDDDDDDLLLLLLLLEEEEEEEEEPPPPPPPGGGGTTTTTTTMMMMMMMMDDDDDDDDSSSSSSVVVVVVVRRRRRRRRRRRAAAAAGGGGPPPPPPPYYYYYYYYYYYYGGGGQQQQQQQQQLLLLLLLLFFFFFFFFFFFRRRRRRRRRRRPPPPPPPDDDDDDDDNNNNNNNNFFFFFFFFFFFVVVVVVVFFFFFFFFFFFGGGGQQQQQQQQQTTTTTTTGGGGAAAAAGGGGNNNNNNNNNNNNNNNNWWWWWWWWWWWWWWAAAAAKKKKKKKKKGGGGHHHHHHHHHHYYYYYYYYYYYYTTTTTTTEEEEEEEEEGGGGAAAAAEEEEEEEEELLLLLLLLIIIIIIIIDDDDDDDDSSSSSSVVVVVVVLLLLLLLLDDDDDDDDVVVVVVVVVVVVVVRRRRRRRRRRRKKKKKKKKKEEEEEEEEEAAAAAEEEEEEEEESSSSSSCCCCCCDDDDDDDDCCCCCCLLLLLLLLQQQQQQQQQGGGGFFFFFFFFFFFQQQQQQQQQIIIIIIIITTTTTTTHHHHHHHHHHSSSSSSLLLLLLLLGGGGGGGGGGGGTTTTTTTGGGGSSSSSSGGGGMMMMMMMMGGGGTTTTTTTLLLLLLLLLLLLLLLLIIIIIIIISSSSSSKKKKKKKKKIIIIIIIIRRRRRRRRRRREEEEEEEEEEEEEEEEEEYYYYYYYYYYYYPPPPPPPDDDDDDDDRRRRRRRRRRRIIIIIIIIMMMMMMMMCCCCCCTTTTTTTYYYYYYYYYYYYSSSSSSVVVVVVVCCCCCCPPPPPPPSSSSSSPPPPPPPKKKKKKKKKVVVVVVVSSSSSSDDDDDDDDTTTTTTTVVVVVVVVVVVVVVEEEEEEEEEPPPPPPPYYYYYYYYYYYYNNNNNNNNAAAAATTTTTTTLLLLLLLLSSSSSSVVVVVVVHHHHHHHHHHQQQQQQQQQLLLLLLLLVVVVVVVEEEEEEEEENNNNNNNNAAAAADDDDDDDDEEEEEEEEEVVVVVVVMMMMMMMMCCCCCCLLLLLLLLDDDDDDDDNNNNNNNNEEEEEEEEEAAAAALLLLLLLLYYYYYYYYYYYYDDDDDDDDIIIIIIIICCCCCCFFFFFFFFFFFRRRRRRRRRRRTTTTTTTLLLLLLLLKKKKKKKKKLLLLLLLLTTTTTTTNNNNNNNNPPPPPPPTTTTTTTYYYYYYYYYYYYGGGGDDDDDDDDLLLLLLLLNNNNNNNNHHHHHHHHHHLLLLLLLLVVVVVVVCCCCCCAAAAAAAAAAMMMMMMMMSSSSSSGGGGIIIIIIIITTTTTTTTTTTTTTLLLLLLLLLLLLLLLLRRRRRRRRRRRFFFFFFFFFFFPPPPPPPGGGGQQQQQQQQQLLLLLLLLNNNNNNNNSSSSSSVVVVVVVLLLLLLLLKKKKKKKKKLLLLLLLLAAAAAVVVVVVVNNNNNNNNLLLLLLLLIIIIIIIIPPPPPPPFFFFFFFFFFFPPPPPPPRRRRRRRRRRRLLLLLLLLHHHHHHHHHHFFFFFFFFFFFFFFFFFFFFFFMMMMMMMMIIIIIIIIGGGGFFFFFFFFFFFAAAAAPPPPPPPLLLLLLLLTTTTTTTSSSSSSRRRRRRRRRRRGGGGSSSSSSQQQQQQQQQQQQQQQQQQYYYYYYYYYYYYRRRRRRRRRRRAAAAALLLLLLLLTTTTTTTVVVVVVVPPPPPPPEEEEEEEEELLLLLLLLTTTTTTTQQQQQQQQQQQQQQQQQQQQQQQQQQQFFFFFFFFFFFDDDDDDDDAAAAAKKKKKKKKKNNNNNNNNMMMMMMMMMMMMMMMMCCCCCCAAAAAAAAAADDDDDDDDPPPPPPPRRRRRRRRRRRHHHHHHHHHHGGGGRRRRRRRRRRRYYYYYYYYYYYYLLLLLLLLTTTTTTTAAAAAAAAAACCCCCCMMMMMMMMFFFFFFFFFFFRRRRRRRRRRRGGGGRRRRRRRRRRRMMMMMMMMSSSSSSTTTTTTTKKKKKKKKKEEEEEEEEEVVVVVVVDDDDDDDDEEEEEEEEEQQQQQQQQQMMMMMMMMLLLLLLLLNNNNNNNNVVVVVVVQQQQQQQQQNNNNNNNNKKKKKKKKKNNNNNNNNSSSSSSSSSSSSYYYYYYYYYYYYFFFFFFFFFFFVVVVVVVEEEEEEEEEWWWWWWWWWWWWWWIIIIIIIIPPPPPPPNNNNNNNNNNNNNNNNIIIIIIIIKKKKKKKKKAAAAASSSSSSVVVVVVVCCCCCCDDDDDDDDIIIIIIIIPPPPPPPPPPPPPPKKKKKKKKKGGGGLLLLLLLLKKKKKKKKKMMMMMMMMSSSSSSTTTTTTTTTTTTTTFFFFFFFFFFFIIIIIIIIGGGGNNNNNNNNSSSSSSTTTTTTTAAAAAIIIIIIIIQQQQQQQQQEEEEEEEEEMMMMMMMMFFFFFFFFFFFKKKKKKKKKRRRRRRRRRRRVVVVVVVSSSSSSEEEEEEEEEQQQQQQQQQFFFFFFFFFFFTTTTTTTAAAAAMMMMMMMMFFFFFFFFFFFRRRRRRRRRRRRRRRRRRRRRRKKKKKKKKKAAAAAFFFFFFFFFFFLLLLLLLLHHHHHHHHHHWWWWWWWWWWWWWWYYYYYYYYYYYYTTTTTTTGGGGEEEEEEEEEGGGGMMMMMMMMDDDDDDDDEEEEEEEEEMMMMMMMMEEEEEEEEEFFFFFFFFFFFTTTTTTTEEEEEEEEEAAAAAEEEEEEEEESSSSSSNNNNNNNNMMMMMMMMNNNNNNNNDDDDDDDDLLLLLLLLVVVVVVVSSSSSSEEEEEEEEEYYYYYYYYYYYYQQQQQQQQQQQQQQQQQQYYYYYYYYYYYYQQQQQQQQQDDDDDDDDAAAAATTTTTTTAAAAAEEEEEEEEEEEEEEEEEEEEEEEEEEEGGGGEEEEEEEEEFFFFFFFFFFFDDDDDDDDEEEEEEEEEDDDDDDDDEEEEEEEEEEEEEEEEEEMMMMMMMMDDDDDDDDEEEEEEEEEMMMMMMMMMMMMMMMMM

SEQ ID NO: 201 - protein, 3511 aa, Neotyphodium coenophialum
MMMMMMMMRRRRRRRRRRREEEEEEEEEIIIIIIIIVVVVVVVHHHHHHHHHHLLLLLLLLQQQQQQQQQTTTTTTTGGGGQQQQQQQQQCCCCCCGGGGNNNNNNNNQQQQQQQQQIIIIIIIIGGGGAAAAAAAAAAFFFFFFFFFFFWWWWWWWWWWWWWWQQQQQQQQQTTTTTTTIIIIIIIISSSSSSGGGGEEEEEEEEEHHHHHHHHHHGGGGLLLLLLLLDDDDDDDDSSSSSSNNNNNNNNGGGGVVVVVVVYYYYYYYYYYYYNNNNNNNNGGGGTTTTTTTSSSSSSEEEEEEEEELLLLLLLLQQQQQQQQQLLLLLLLLEEEEEEEEERRRRRRRRRRRMMMMMMMMSSSSSSVVVVVVVYYYYYYYYYYYYFFFFFFFFFFFNNNNNNNNEEEEEEEEEAAAAASSSSSSGGGGNNNNNNNNKKKKKKKKKYYYYYYYYYYYYVVVVVVVPPPPPPPRRRRRRRRRRRAAAAAVVVVVVVLLLLLLLLVVVVVVVDDDDDDDDLLLLLLLLEEEEEEEEEPPPPPPPGGGGTTTTTTTMMMMMMMMDDDDDDDDAAAAAVVVVVVVRRRRRRRRRRRAAAAAGGGGPPPPPPPFFFFFFFFFFFGGGGQQQQQQQQQLLLLLLLLFFFFFFFFFFFRRRRRRRRRRRPPPPPPPDDDDDDDDNNNNNNNNFFFFFFFFFFFVVVVVVVFFFFFFFFFFFGGGGQQQQQQQQQSSSSSSGGGGAAAAAGGGGNNNNNNNNNNNNNNNNWWWWWWWWWWWWWWAAAAAKKKKKKKKKGGGGHHHHHHHHHHYYYYYYYYYYYYTTTTTTTEEEEEEEEEGGGGAAAAAEEEEEEEEELLLLLLLLVVVVVVVDDDDDDDDQQQQQQQQQVVVVVVVLLLLLLLLDDDDDDDDVVVVVVVVVVVVVVRRRRRRRRRRRRRRRRRRRRRREEEEEEEEEAAAAAEEEEEEEEEGGGGCCCCCCDDDDDDDDCCCCCCLLLLLLLLQQQQQQQQQGGGGFFFFFFFFFFFQQQQQQQQQIIIIIIIITTTTTTTHHHHHHHHHHSSSSSSLLLLLLLLGGGGGGGGGGGGTTTTTTTGGGGAAAAAGGGGMMMMMMMMGGGGTTTTTTTLLLLLLLLLLLLLLLLIIIIIIIISSSSSSKKKKKKKKKIIIIIIIIRRRRRRRRRRREEEEEEEEEEEEEEEEEEFFFFFFFFFFFPPPPPPPDDDDDDDDRRRRRRRRRRRMMMMMMMMMMMMMMMMAAAAATTTTTTTFFFFFFFFFFFSSSSSSVVVVVVVVVVVVVVPPPPPPPSSSSSSPPPPPPPKKKKKKKKKVVVVVVVSSSSSSDDDDDDDDTTTTTTTVVVVVVVVVVVVVVEEEEEEEEEPPPPPPPYYYYYYYYYYYYNNNNNNNNAAAAATTTTTTTLLLLLLLLSSSSSSVVVVVVVHHHHHHHHHHQQQQQQQQQLLLLLLLLVVVVVVVEEEEEEEEENNNNNNNNSSSSSSDDDDDDDDEEEEEEEEETTTTTTTFFFFFFFFFFFCCCCCCIIIIIIIIDDDDDDDDNNNNNNNNEEEEEEEEEAAAAALLLLLLLLYYYYYYYYYYYYDDDDDDDDIIIIIIIICCCCCCMMMMMMMMRRRRRRRRRRRTTTTTTTLLLLLLLLKKKKKKKKKLLLLLLLLSSSSSSNNNNNNNNPPPPPPPSSSSSSYYYYYYYYYYYYGGGGDDDDDDDDLLLLLLLLNNNNNNNNYYYYYYYYYYYYLLLLLLLLVVVVVVVSSSSSSAAAAAVVVVVVVMMMMMMMMSSSSSSGGGGVVVVVVVTTTTTTTTTTTTTTCCCCCCLLLLLLLLRRRRRRRRRRRFFFFFFFFFFFPPPPPPPGGGGQQQQQQQQQLLLLLLLLNNNNNNNNSSSSSSDDDDDDDDLLLLLLLLRRRRRRRRRRRKKKKKKKKKLLLLLLLLAAAAAVVVVVVVNNNNNNNNMMMMMMMMVVVVVVVPPPPPPPFFFFFFFFFFFPPPPPPPRRRRRRRRRRRLLLLLLLLHHHHHHHHHHFFFFFFFFFFFFFFFFFFFFFFMMMMMMMMVVVVVVVGGGGFFFFFFFFFFFAAAAAPPPPPPPLLLLLLLLTTTTTTTSSSSSSRRRRRRRRRRRGGGGAAAAAHHHHHHHHHHSSSSSSFFFFFFFFFFFRRRRRRRRRRRAAAAAVVVVVVVSSSSSSVVVVVVVPPPPPPPEEEEEEEEELLLLLLLLTTTTTTTQQQQQQQQQQQQQQQQQQMMMMMMMMFFFFFFFFFFFDDDDDDDDPPPPPPPKKKKKKKKKNNNNNNNNMMMMMMMMMMMMMMMMAAAAAAAAAASSSSSSDDDDDDDDFFFFFFFFFFFRRRRRRRRRRRNNNNNNNNGGGGRRRRRRRRRRRYYYYYYYYYYYYLLLLLLLLTTTTTTTCCCCCCSSSSSSAAAAAIIIIIIIIFFFFFFFFFFFRRRRRRRRRRRGGGGKKKKKKKKKVVVVVVVAAAAAMMMMMMMMKKKKKKKKKEEEEEEEEEVVVVVVVEEEEEEEEEDDDDDDDDQQQQQQQQQMMMMMMMMRRRRRRRRRRRNNNNNNNNVVVVVVVQQQQQQQQQNNNNNNNNKKKKKKKKKNNNNNNNNSSSSSSSSSSSSYYYYYYYYYYYYFFFFFFFFFFFVVVVVVVEEEEEEEEEWWWWWWWWWWWWWWIIIIIIIIPPPPPPPNNNNNNNNNNNNNNNNIIIIIIIIQQQQQQQQQTTTTTTTAAAAALLLLLLLLCCCCCCAAAAAIIIIIIIIPPPPPPPPPPPPPPRRRRRRRRRRRDDDDDDDDLLLLLLLLKKKKKKKKKMMMMMMMMSSSSSSSSSSSSTTTTTTTFFFFFFFFFFFIIIIIIIIGGGGNNNNNNNNSSSSSSTTTTTTTSSSSSSIIIIIIIIQQQQQQQQQEEEEEEEEELLLLLLLLFFFFFFFFFFFKKKKKKKKKRRRRRRRRRRRVVVVVVVGGGGEEEEEEEEEQQQQQQQQQFFFFFFFFFFFTTTTTTTAAAAAMMMMMMMMFFFFFFFFFFFRRRRRRRRRRRRRRRRRRRRRRKKKKKKKKKAAAAAFFFFFFFFFFFLLLLLLLLHHHHHHHHHHWWWWWWWWWWWWWWYYYYYYYYYYYYTTTTTTTGGGGEEEEEEEEEGGGGMMMMMMMMDDDDDDDDEEEEEEEEEMMMMMMMMEEEEEEEEEFFFFFFFFFFFTTTTTTTEEEEEEEEEAAAAAEEEEEEEEESSSSSSNNNNNNNNMMMMMMMMNNNNNNNNDDDDDDDDLLLLLLLLVVVVVVVSSSSSSEEEEEEEEEYYYYYYYYYYYYQQQQQQQQQQQQQQQQQQYYYYYYYYYYYYQQQQQQQQQDDDDDDDDAAAAAGGGGIIIIIIIIDDDDDDDDEEEEEEEEEEEEEEEEEEEEEEEEEEEEEEEEEEEEEEEEEEEEEYYYYYYYYYYYYEEEEEEEEEEEEEEEEEEEEEEEEEEEAAAAAPPPPPPPVVVVVVVDDDDDDDDEEEEEEEEEPPPPPPPLLLLLLLLEEEEEEEEEE

SEQ ID NO: 202 - protein, 3520 aa, Ajellomyces capsulatus
MMMMMMMMRRRRRRRRRRREEEEEEEEEIIIIIIIIVVVVVVVHHHHHHHHHHLLLLLLLLQQQQQQQQQTTTTTTTGGGGQQQQQQQQQCCCCCCGGGGNNNNNNNNQQQQQQQQQIIIIIIIIGGGGAAAAAAAAAAFFFFFFFFFFFWWWWWWWWWWWWWWQQQQQQQQQTTTTTTTIIIIIIIISSSSSSGGGGEEEEEEEEEHHHHHHHHHHGGGGVVVVVVVDDDDDDDDGGGGAAAAAGGGGYYYYYYYYYYYYYYYYYYYYYYYYNNNNNNNNGGGGSSSSSSLLLLLLLLDDDDDDDDIIIIIIIIQQQQQQQQQLLLLLLLLEEEEEEEEERRRRRRRRRRRMMMMMMMMNNNNNNNNVVVVVVVYYYYYYYYYYYYFFFFFFFFFFFNNNNNNNNEEEEEEEEEAAAAAAAAAAEEEEEEEEEKKKKKKKKKKKKKKKKKKYYYYYYYYYYYYVVVVVVVPPPPPPPRRRRRRRRRRRAAAAAVVVVVVVLLLLLLLLVVVVVVVDDDDDDDDLLLLLLLLEEEEEEEEEPPPPPPPGGGGTTTTTTTMMMMMMMMDDDDDDDDSSSSSSVVVVVVVRRRRRRRRRRRAAAAAGGGGPPPPPPPFFFFFFFFFFFGGGGQQQQQQQQQLLLLLLLLFFFFFFFFFFFRRRRRRRRRRRPPPPPPPDDDDDDDDNNNNNNNNFFFFFFFFFFFVVVVVVVFFFFFFFFFFFVVVVVVVQQQQQQQQQSSSSSSGGGGAAAAAGGGGNNNNNNNNTTTTTTTWWWWWWWWWWWWWWAAAAAKKKKKKKKKGGGGHHHHHHHHHHYYYYYYYYYYYYTTTTTTTEEEEEEEEEGGGGSSSSSSEEEEEEEEELLLLLLLLVVVVVVVDDDDDDDDQQQQQQQQQVVVVVVVIIIIIIIIDDDDDDDDVVVVVVVVVVVVVVRRRRRRRRRRRRRRRRRRRRRREEEEEEEEEAAAAAEEEEEEEEERRRRRRRRRRRCCCCCCDDDDDDDDCCCCCCLLLLLLLLQQQQQQQQQGGGGFFFFFFFFFFFQQQQQQQQQIIIIIIIIIIIIIIIIHHHHHHHHHHSSSSSSLLLLLLLLGGGGGGGGGGGGTTTTTTTGGGGAAAAAGGGGMMMMMMMMGGGGTTTTTTTLLLLLLLLLLLLLLLLIIIIIIIISSSSSSKKKKKKKKKIIIIIIIIRRRRRRRRRRREEEEEEEEEEEEEEEEEEFFFFFFFFFFFPPPPPPPDDDDDDDDRRRRRRRRRRRMMMMMMMMMMMMMMMMAAAAATTTTTTTFFFFFFFFFFFSSSSSSSSSSSSVVVVVVVVVVVVVVPPPPPPPSSSSSSPPPPPPPKKKKKKKKKVVVVVVVSSSSSSDDDDDDDDTTTTTTTVVVVVVVVVVVVVVEEEEEEEEEPPPPPPPYYYYYYYYYYYYNNNNNNNNAAAAATTTTTTTLLLLLLLLSSSSSSNNNNNNNNHHHHHHHHHHQQQQQQQQQLLLLLLLLVVVVVVVEEEEEEEEENNNNNNNNSSSSSSDDDDDDDDEEEEEEEEETTTTTTTFFFFFFFFFFFCCCCCCIIIIIIIIDDDDDDDDNNNNNNNNEEEEEEEEEAAAAALLLLLLLLYYYYYYYYYYYYDDDDDDDDIIIIIIIICCCCCCMMMMMMMMRRRRRRRRRRRTTTTTTTLLLLLLLLKKKKKKKKKLLLLLLLLSSSSSSEEEEEEEEEPPPPPPPSSSSSSYYYYYYYYYYYYGGGGDDDDDDDDLLLLLLLLNNNNNNNNHHHHHHHHHHLLLLLLLLVVVVVVVSSSSSSAAAAAVVVVVVVMMMMMMMMSSSSSSGGGGVVVVVVVTTTTTTTTTTTTTTCCCCCCLLLLLLLLRRRRRRRRRRRFFFFFFFFFFFPPPPPPPGGGGQQQQQQQQQLLLLLLLLNNNNNNNNSSSSSSDDDDDDDDLLLLLLLLRRRRRRRRRRRKKKKKKKKKLLLLLLLLAAAAAVVVVVVVNNNNNNNNMMMMMMMMVVVVVVVPPPPPPPFFFFFFFFFFFPPPPPPPRRRRRRRRRRRLLLLLLLLHHHHHHHHHHFFFFFFFFFFFFFFFFFFFFFFMMMMMMMMVVVVVVVGGGGFFFFFFFFFFFAAAAAPPPPPPPLLLLLLLLTTTTTTTSSSSSSRRRRRRRRRRRGGGGAAAAAYYYYYYYYYYYYSSSSSSFFFFFFFFFFFRRRRRRRRRRRVVVVVVVVVVVVVVTTTTTTTVVVVVVVPPPPPPPEEEEEEEEELLLLLLLLTTTTTTTQQQQQQQQQKKKKKKKKKMMMMMMMMYYYYYYYYYYYYDDDDDDDDPPPPPPPKKKKKKKKKNNNNNNNNMMMMMMMMMMMMMMMMCCCCCCLLLLLLLLLLLLLLLLDDDDDDDDFFFFFFFFFFFRRRRRRRRRRRNNNNNNNNGGGGRRRRRRRRRRRYYYYYYYYYYYYLLLLLLLLTTTTTTTAAAAASSSSSSAAAAAIIIIIIIIFFFFFFFFFFFRRRRRRRRRRRGGGGKKKKKKKKKVVVVVVVSSSSSSMMMMMMMMKKKKKKKKKEEEEEEEEEVVVVVVVEEEEEEEEEDDDDDDDDQQQQQQQQQMMMMMMMMRRRRRRRRRRRNNNNNNNNVVVVVVVQQQQQQQQQNNNNNNNNKKKKKKKKKNNNNNNNNHHHHHHHHHHTTTTTTTYYYYYYYYYYYYFFFFFFFFFFFVVVVVVVEEEEEEEEEWWWWWWWWWWWWWWIIIIIIIIPPPPPPPNNNNNNNNNNNNNNNNVVVVVVVQQQQQQQQQTTTTTTTAAAAALLLLLLLLCCCCCCSSSSSSIIIIIIIIPPPPPPPPPPPPPPRRRRRRRRRRRGGGGLLLLLLLLKKKKKKKKKMMMMMMMMSSSSSSSSSSSSTTTTTTTFFFFFFFFFFFVVVVVVVEEEEEEEEENNNNNNNNSSSSSSTTTTTTTAAAAAIIIIIIIIQQQQQQQQQEEEEEEEEELLLLLLLLFFFFFFFFFFFKKKKKKKKKRRRRRRRRRRRVVVVVVVGGGGDDDDDDDDQQQQQQQQQFFFFFFFFFFFTTTTTTTAAAAAMMMMMMMMFFFFFFFFFFFRRRRRRRRRRRRRRRRRRRRRRKKKKKKKKKAAAAAFFFFFFFFFFFLLLLLLLLHHHHHHHHHHWWWWWWWWWWWWWWYYYYYYYYYYYYTTTTTTTGGGGEEEEEEEEEGGGGMMMMMMMMDDDDDDDDEEEEEEEEEMMMMMMMMEEEEEEEEEFFFFFFFFFFFTTTTTTTEEEEEEEEEAAAAAEEEEEEEEESSSSSSNNNNNNNNMMMMMMMMNNNNNNNNDDDDDDDDLLLLLLLLVVVVVVVSSSSSSEEEEEEEEEYYYYYYYYYYYYQQQQQQQQQQQQQQQQQQYYYYYYYYYYYYQQQQQQQQQDDDDDDDDAAAAASSSSSSIIIIIIIISSSSSSEEEEEEEEEGGGGEEEEEEEEEDDDDDDDDEEEEEEEEEYYYYYYYYYYYYFFFFFFFFFFFDDDDDDDDYYYYYYYYYYYYAAAAAWWWWWWWWWWWWWWAAAAAMMMMMMMMM

SEQ ID NO: 203 - protein, 3511 aa, Aspergillus flavus
MMMMMMMMRRRRRRRRRRREEEEEEEEEIIIIIIIIVVVVVVVHHHHHHHHHHLLLLLLLLQQQQQQQQQTTTTTTTGGGGQQQQQQQQQCCCCCCGGGGNNNNNNNNQQQQQQQQQIIIIIIIIGGGGAAAAAAAAAAFFFFFFFFFFFWWWWWWWWWWWWWWQQQQQQQQQTTTTTTTIIIIIIIISSSSSSGGGGEEEEEEEEEHHHHHHHHHHGGGGLLLLLLLLDDDDDDDDGGGGSSSSSSGGGGVVVVVVVYYYYYYYYYYYYNNNNNNNNGGGGSSSSSSSSSSSSDDDDDDDDLLLLLLLLQQQQQQQQQLLLLLLLLEEEEEEEEERRRRRRRRRRRMMMMMMMMNNNNNNNNVVVVVVVYYYYYYYYYYYYFFFFFFFFFFFNNNNNNNNEEEEEEEEEAAAAASSSSSSGGGGNNNNNNNNKKKKKKKKKYYYYYYYYYYYYVVVVVVVPPPPPPPRRRRRRRRRRRAAAAAVVVVVVVLLLLLLLLVVVVVVVDDDDDDDDLLLLLLLLEEEEEEEEEPPPPPPPGGGGTTTTTTTMMMMMMMMDDDDDDDDAAAAAVVVVVVVRRRRRRRRRRRAAAAAGGGGPPPPPPPFFFFFFFFFFFGGGGQQQQQQQQQLLLLLLLLFFFFFFFFFFFRRRRRRRRRRRPPPPPPPDDDDDDDDNNNNNNNNFFFFFFFFFFFVVVVVVVFFFFFFFFFFFGGGGQQQQQQQQQSSSSSSGGGGAAAAAGGGGNNNNNNNNNNNNNNNNWWWWWWWWWWWWWWAAAAAKKKKKKKKKGGGGHHHHHHHHHHYYYYYYYYYYYYTTTTTTTEEEEEEEEEGGGGAAAAAEEEEEEEEELLLLLLLLVVVVVVVDDDDDDDDQQQQQQQQQVVVVVVVVVVVVVVDDDDDDDDVVVVVVVVVVVVVVRRRRRRRRRRRRRRRRRRRRRREEEEEEEEEAAAAAEEEEEEEEEGGGGCCCCCCDDDDDDDDCCCCCCLLLLLLLLQQQQQQQQQGGGGFFFFFFFFFFFQQQQQQQQQIIIIIIIITTTTTTTHHHHHHHHHHSSSSSSLLLLLLLLGGGGGGGGGGGGTTTTTTTGGGGAAAAAGGGGMMMMMMMMGGGGTTTTTTTLLLLLLLLLLLLLLLLIIIIIIIISSSSSSKKKKKKKKKIIIIIIIIRRRRRRRRRRREEEEEEEEEEEEEEEEEEFFFFFFFFFFFPPPPPPPDDDDDDDDRRRRRRRRRRRMMMMMMMMMMMMMMMMAAAAATTTTTTTYYYYYYYYYYYYSSSSSSVVVVVVVVVVVVVVPPPPPPPSSSSSSPPPPPPPKKKKKKKKKVVVVVVVSSSSSSDDDDDDDDTTTTTTTVVVVVVVVVVVVVVEEEEEEEEEPPPPPPPYYYYYYYYYYYYNNNNNNNNAAAAATTTTTTTLLLLLLLLSSSSSSVVVVVVVHHHHHHHHHHQQQQQQQQQLLLLLLLLVVVVVVVEEEEEEEEEHHHHHHHHHHSSSSSSDDDDDDDDEEEEEEEEETTTTTTTFFFFFFFFFFFCCCCCCIIIIIIIIDDDDDDDDNNNNNNNNEEEEEEEEEAAAAALLLLLLLLYYYYYYYYYYYYDDDDDDDDIIIIIIIICCCCCCMMMMMMMMRRRRRRRRRRRTTTTTTTLLLLLLLLKKKKKKKKKLLLLLLLLSSSSSSNNNNNNNNPPPPPPPSSSSSSYYYYYYYYYYYYGGGGDDDDDDDDLLLLLLLLNNNNNNNNHHHHHHHHHHLLLLLLLLVVVVVVVSSSSSSAAAAAVVVVVVVMMMMMMMMSSSSSSGGGGVVVVVVVTTTTTTTTTTTTTTCCCCCCLLLLLLLLRRRRRRRRRRRFFFFFFFFFFFPPPPPPPGGGGQQQQQQQQQLLLLLLLLNNNNNNNNSSSSSSDDDDDDDDLLLLLLLLRRRRRRRRRRRKKKKKKKKKLLLLLLLLAAAAAVVVVVVVNNNNNNNNMMMMMMMMVVVVVVVPPPPPPPFFFFFFFFFFFPPPPPPPRRRRRRRRRRRLLLLLLLLHHHHHHHHHHFFFFFFFFFFFFFFFFFFFFFFMMMMMMMMVVVVVVVGGGGFFFFFFFFFFFAAAAAPPPPPPPLLLLLLLLTTTTTTTSSSSSSRRRRRRRRRRRGGGGAAAAAHHHHHHHHHHSSSSSSFFFFFFFFFFFRRRRRRRRRRRAAAAAVVVVVVVSSSSSSVVVVVVVPPPPPPPEEEEEEEEELLLLLLLLTTTTTTTQQQQQQQQQQQQQQQQQQMMMMMMMMFFFFFFFFFFFDDDDDDDDPPPPPPPKKKKKKKKKNNNNNNNNMMMMMMMMMMMMMMMMAAAAAAAAAASSSSSSDDDDDDDDFFFFFFFFFFFRRRRRRRRRRRNNNNNNNNGGGGRRRRRRRRRRRYYYYYYYYYYYYLLLLLLLLTTTTTTTCCCCCCSSSSSSAAAAAIIIIIIIIFFFFFFFFFFFRRRRRRRRRRRGGGGKKKKKKKKKVVVVVVVSSSSSSMMMMMMMMKKKKKKKKKEEEEEEEEEVVVVVVVEEEEEEEEEDDDDDDDDQQQQQQQQQMMMMMMMMRRRRRRRRRRRNNNNNNNNIIIIIIIIQQQQQQQQQSSSSSSKKKKKKKKKNNNNNNNNQQQQQQQQQTTTTTTTYYYYYYYYYYYYFFFFFFFFFFFVVVVVVVEEEEEEEEEWWWWWWWWWWWWWWIIIIIIIIPPPPPPPNNNNNNNNNNNNNNNNIIIIIIIIQQQQQQQQQTTTTTTTAAAAALLLLLLLLCCCCCCSSSSSSIIIIIIIIPPPPPPPPPPPPPPRRRRRRRRRRRGGGGLLLLLLLLKKKKKKKKKMMMMMMMMSSSSSSSSSSSSTTTTTTTFFFFFFFFFFFIIIIIIIIGGGGNNNNNNNNSSSSSSTTTTTTTSSSSSSIIIIIIIIQQQQQQQQQEEEEEEEEELLLLLLLLFFFFFFFFFFFKKKKKKKKKRRRRRRRRRRRVVVVVVVGGGGDDDDDDDDQQQQQQQQQFFFFFFFFFFFTTTTTTTAAAAAMMMMMMMMFFFFFFFFFFFRRRRRRRRRRRRRRRRRRRRRRKKKKKKKKKAAAAAFFFFFFFFFFFLLLLLLLLHHHHHHHHHHWWWWWWWWWWWWWWYYYYYYYYYYYYTTTTTTTGGGGEEEEEEEEEGGGGMMMMMMMMDDDDDDDDEEEEEEEEEMMMMMMMMEEEEEEEEEFFFFFFFFFFFTTTTTTTEEEEEEEEEAAAAAEEEEEEEEESSSSSSNNNNNNNNMMMMMMMMNNNNNNNNDDDDDDDDLLLLLLLLVVVVVVVSSSSSSEEEEEEEEEYYYYYYYYYYYYQQQQQQQQQQQQQQQQQQYYYYYYYYYYYYQQQQQQQQQDDDDDDDDAAAAASSSSSSIIIIIIIISSSSSSEEEEEEEEEGGGGEEEEEEEEEEEEEEEEEEEEEEEEEEEYYYYYYYYYYYYLLLLLLLLEEEEEEEEEEEEEEEEEEEEEEEEEEEEEEEEEEEEPPPPPPPLLLLLLLLEEEEEEEEEHHHHHHHHHHEEEEEEEEEEEEEEEEEEE

SEQ ID NO: 204 - protein, 3513 aa, Aspergillus parasiticus
MMMMMMMMRRRRRRRRRRREEEEEEEEEIIIIIIIIVVVVVVVYYYYYYYYYYYYLLLLLLLLQQQQQQQQQTTTTTTTGGGGQQQQQQQQQCCCCCCGGGGNNNNNNNNQQQQQQQQQIIIIIIIIGGGGAAAAAAAAAAFFFFFFFFFFFWWWWWWWWWWWWWWQQQQQQQQQTTTTTTTIIIIIIIISSSSSSGGGGEEEEEEEEEHHHHHHHHHHGGGGLLLLLLLLDDDDDDDDGGGGSSSSSSGGGGVVVVVVVYYYYYYYYYYYYNNNNNNNNGGGGSSSSSSSSSSSSDDDDDDDDLLLLLLLLQQQQQQQQQLLLLLLLLEEEEEEEEERRRRRRRRRRRMMMMMMMMNNNNNNNNVVVVVVVYYYYYYYYYYYYFFFFFFFFFFFNNNNNNNNEEEEEEEEEAAAAASSSSSSGGGGNNNNNNNNKKKKKKKKKYYYYYYYYYYYYVVVVVVVPPPPPPPRRRRRRRRRRRAAAAAVVVVVVVLLLLLLLLVVVVVVVDDDDDDDDLLLLLLLLEEEEEEEEEPPPPPPPGGGGTTTTTTTMMMMMMMMDDDDDDDDAAAAAVVVVVVVRRRRRRRRRRRAAAAAGGGGPPPPPPPFFFFFFFFFFFGGGGQQQQQQQQQLLLLLLLLFFFFFFFFFFFRRRRRRRRRRRPPPPPPPDDDDDDDDNNNNNNNNFFFFFFFFFFFVVVVVVVFFFFFFFFFFFGGGGQQQQQQQQQSSSSSSGGGGAAAAAGGGGNNNNNNNNNNNNNNNNWWWWWWWWWWWWWWAAAAAKKKKKKKKKGGGGHHHHHHHHHHYYYYYYYYYYYYTTTTTTTEEEEEEEEEGGGGAAAAAEEEEEEEEELLLLLLLLVVVVVVVDDDDDDDDQQQQQQQQQVVVVVVVVVVVVVVDDDDDDDDVVVVVVVVVVVVVVRRRRRRRRRRRRRRRRRRRRRREEEEEEEEEAAAAAEEEEEEEEEGGGGCCCCCCDDDDDDDDCCCCCCLLLLLLLLQQQQQQQQQGGGGFFFFFFFFFFFQQQQQQQQQIIIIIIIITTTTTTTHHHHHHHHHHSSSSSSLLLLLLLLGGGGGGGGGGGGTTTTTTTGGGGAAAAAGGGGMMMMMMMMGGGGTTTTTTTLLLLLLLLLLLLLLLLIIIIIIIISSSSSSKKKKKKKKKIIIIIIIIRRRRRRRRRRREEEEEEEEEEEEEEEEEEFFFFFFFFFFFPPPPPPPDDDDDDDDRRRRRRRRRRRMMMMMMMMMMMMMMMMAAAAATTTTTTTFFFFFFFFFFFSSSSSSVVVVVVVMMMMMMMMPPPPPPPSSSSSSPPPPPPPKKKKKKKKKVVVVVVVSSSSSSDDDDDDDDTTTTTTTVVVVVVVVVVVVVVEEEEEEEEEPPPPPPPYYYYYYYYYYYYNNNNNNNNAAAAATTTTTTTLLLLLLLLSSSSSSVVVVVVVHHHHHHHHHHQQQQQQQQQLLLLLLLLVVVVVVVEEEEEEEEEHHHHHHHHHHSSSSSSDDDDDDDDEEEEEEEEETTTTTTTFFFFFFFFFFFCCCCCCIIIIIIIIDDDDDDDDNNNNNNNNEEEEEEEEEAAAAALLLLLLLLYYYYYYYYYYYYDDDDDDDDIIIIIIIICCCCCCMMMMMMMMRRRRRRRRRRRTTTTTTTLLLLLLLLKKKKKKKKKLLLLLLLLSSSSSSNNNNNNNNPPPPPPPSSSSSSYYYYYYYYYYYYGGGGDDDDDDDDLLLLLLLLNNNNNNNNHHHHHHHHHHLLLLLLLLVVVVVVVSSSSSSAAAAAVVVVVVVMMMMMMMMSSSSSSGGGGVVVVVVVTTTTTTTTTTTTTTCCCCCCLLLLLLLLRRRRRRRRRRRFFFFFFFFFFFPPPPPPPGGGGQQQQQQQQQLLLLLLLLNNNNNNNNSSSSSSDDDDDDDDLLLLLLLLRRRRRRRRRRRKKKKKKKKKLLLLLLLLAAAAAVVVVVVVNNNNNNNNMMMMMMMMVVVVVVVPPPPPPPFFFFFFFFFFFPPPPPPPRRRRRRRRRRRLLLLLLLLHHHHHHHHHHFFFFFFFFFFFFFFFFFFFFFFMMMMMMMMVVVVVVVGGGGFFFFFFFFFFFAAAAAPPPPPPPLLLLLLLLTTTTTTTSSSSSSRRRRRRRRRRRGGGGAAAAAHHHHHHHHHHSSSSSSFFFFFFFFFFFRRRRRRRRRRRAAAAAVVVVVVVSSSSSSVVVVVVVPPPPPPPEEEEEEEEELLLLLLLLTTTTTTTQQQQQQQQQQQQQQQQQQMMMMMMMMFFFFFFFFFFFDDDDDDDDPPPPPPPKKKKKKKKKNNNNNNNNMMMMMMMMMMMMMMMMAAAAAAAAAASSSSSSDDDDDDDDFFFFFFFFFFFRRRRRRRRRRRNNNNNNNNGGGGRRRRRRRRRRRYYYYYYYYYYYYLLLLLLLLTTTTTTTCCCCCCSSSSSSAAAAAIIIIIIIIFFFFFFFFFFFRRRRRRRRRRRGGGGKKKKKKKKKVVVVVVVSSSSSSMMMMMMMMKKKKKKKKKEEEEEEEEEVVVVVVVEEEEEEEEEDDDDDDDDQQQQQQQQQMMMMMMMMRRRRRRRRRRRNNNNNNNNIIIIIIIIQQQQQQQQQSSSSSSKKKKKKKKKNNNNNNNNQQQQQQQQQTTTTTTTYYYYYYYYYYYYFFFFFFFFFFFVVVVVVVEEEEEEEEEWWWWWWWWWWWWWWIIIIIIIIPPPPPPPNNNNNNNNNNNNNNNNIIIIIIIIQQQQQQQQQTTTTTTTAAAAALLLLLLLLCCCCCCSSSSSSIIIIIIIIPPPPPPPPPPPPPPRRRRRRRRRRRGGGGLLLLLLLLKKKKKKKKKMMMMMMMMSSSSSSSSSSSSTTTTTTTFFFFFFFFFFFIIIIIIIIGGGGNNNNNNNNSSSSSSTTTTTTTSSSSSSIIIIIIIIQQQQQQQQQEEEEEEEEELLLLLLLLFFFFFFFFFFFKKKKKKKKKRRRRRRRRRRRVVVVVVVGGGGDDDDDDDDQQQQQQQQQFFFFFFFFFFFTTTTTTTAAAAAMMMMMMMMFFFFFFFFFFFRRRRRRRRRRRRRRRRRRRRRRKKKKKKKKKAAAAAFFFFFFFFFFFLLLLLLLLHHHHHHHHHHWWWWWWWWWWWWWWYYYYYYYYYYYYTTTTTTTGGGGEEEEEEEEEGGGGMMMMMMMMDDDDDDDDEEEEEEEEEMMMMMMMMEEEEEEEEEFFFFFFFFFFFTTTTTTTEEEEEEEEEAAAAAEEEEEEEEESSSSSSNNNNNNNNMMMMMMMMNNNNNNNNDDDDDDDDLLLLLLLLVVVVVVVSSSSSSEEEEEEEEEYYYYYYYYYYYYQQQQQQQQQQQQQQQQQQYYYYYYYYYYYYQQQQQQQQQDDDDDDDDAAAAASSSSSSIIIIIIIISSSSSSEEEEEEEEEGGGGEEEEEEEEEEEEEEEEEEEEEEEEEEEYYYYYYYYYYYYLLLLLLLLEEEEEEEEEEEEEEEEEEEEEEEEEEEEEEEEEEEEPPPPPPPLLLLLLLLEEEEEEEEEHHHHHHHHHHEEEEEEEEEEEEEEEEEEE

SEQ ID NO: 205 - protein, 3461 aa, Babesia bovis
MMMMMMMMRRRRRRRRRRREEEEEEEEEIIIIIIIIVVVVVVVHHHHHHHHHHIIIIIIIIQQQQQQQQQAAAAAGGGGQQQQQQQQQCCCCCCGGGGNNNNNNNNQQQQQQQQQIIIIIIIIGGGGAAAAAKKKKKKKKKFFFFFFFFFFFWWWWWWWWWWWWWWEEEEEEEEEVVVVVVVIIIIIIIISSSSSSDDDDDDDDEEEEEEEEEHHHHHHHHHHGGGGIIIIIIIIDDDDDDDDQQQQQQQQQSSSSSSGGGGTTTTTTTYYYYYYYYYYYYHHHHHHHHHHGGGGDDDDDDDDSSSSSSDDDDDDDDLLLLLLLLQQQQQQQQQLLLLLLLLEEEEEEEEERRRRRRRRRRRIIIIIIIIDDDDDDDDVVVVVVVFFFFFFFFFFFYYYYYYYYYYYYNNNNNNNNEEEEEEEEEAAAAATTTTTTTGGGGGGGGRRRRRRRRRRRYYYYYYYYYYYYVVVVVVVPPPPPPPRRRRRRRRRRRAAAAAVVVVVVVLLLLLLLLMMMMMMMMDDDDDDDDLLLLLLLLEEEEEEEEEPPPPPPPGGGGTTTTTTTMMMMMMMMDDDDDDDDSSSSSSVVVVVVVRRRRRRRRRRRAAAAAGGGGPPPPPPPFFFFFFFFFFFGGGGQQQQQQQQQLLLLLLLLFFFFFFFFFFFRRRRRRRRRRRPPPPPPPDDDDDDDDNNNNNNNNFFFFFFFFFFFVVVVVVVFFFFFFFFFFFGGGGQQQQQQQQQTTTTTTTGGGGAAAAAGGGGNNNNNNNNNNNNNNNNWWWWWWWWWWWWWWAAAAAKKKKKKKKKGGGGHHHHHHHHHHYYYYYYYYYYYYTTTTTTTEEEEEEEEEGGGGAAAAAEEEEEEEEELLLLLLLLIIIIIIIIDDDDDDDDSSSSSSVVVVVVVLLLLLLLLDDDDDDDDVVVVVVVVVVVVVVRRRRRRRRRRRKKKKKKKKKEEEEEEEEEAAAAAEEEEEEEEEGGGGCCCCCCDDDDDDDDCCCCCCLLLLLLLLQQQQQQQQQGGGGFFFFFFFFFFFQQQQQQQQQIIIIIIIITTTTTTTHHHHHHHHHHSSSSSSLLLLLLLLGGGGGGGGGGGGTTTTTTTGGGGSSSSSSGGGGMMMMMMMMGGGGTTTTTTTLLLLLLLLLLLLLLLLIIIIIIIISSSSSSKKKKKKKKKIIIIIIIIRRRRRRRRRRREEEEEEEEEEEEEEEEEEYYYYYYYYYYYYPPPPPPPDDDDDDDDRRRRRRRRRRRIIIIIIIIMMMMMMMMEEEEEEEEETTTTTTTFFFFFFFFFFFSSSSSSVVVVVVVFFFFFFFFFFFPPPPPPPSSSSSSPPPPPPPKKKKKKKKKVVVVVVVSSSSSSDDDDDDDDTTTTTTTVVVVVVVVVVVVVVEEEEEEEEEPPPPPPPYYYYYYYYYYYYNNNNNNNNAAAAATTTTTTTLLLLLLLLSSSSSSVVVVVVVHHHHHHHHHHQQQQQQQQQLLLLLLLLVVVVVVVEEEEEEEEENNNNNNNNAAAAADDDDDDDDEEEEEEEEEVVVVVVVQQQQQQQQQVVVVVVVIIIIIIIIDDDDDDDDNNNNNNNNEEEEEEEEEAAAAALLLLLLLLYYYYYYYYYYYYDDDDDDDDIIIIIIIICCCCCCFFFFFFFFFFFRRRRRRRRRRRTTTTTTTLLLLLLLLKKKKKKKKKLLLLLLLLTTTTTTTTTTTTTTPPPPPPPTTTTTTTYYYYYYYYYYYYGGGGDDDDDDDDLLLLLLLLNNNNNNNNHHHHHHHHHHLLLLLLLLVVVVVVVSSSSSSAAAAAAAAAAMMMMMMMMSSSSSSGGGGVVVVVVVTTTTTTTCCCCCCSSSSSSLLLLLLLLRRRRRRRRRRRFFFFFFFFFFFPPPPPPPGGGGQQQQQQQQQLLLLLLLLNNNNNNNNSSSSSSDDDDDDDDLLLLLLLLRRRRRRRRRRRKKKKKKKKKLLLLLLLLAAAAAVVVVVVVNNNNNNNNLLLLLLLLIIIIIIIIPPPPPPPFFFFFFFFFFFPPPPPPPRRRRRRRRRRRLLLLLLLLHHHHHHHHHHFFFFFFFFFFFFFFFFFFFFFFMMMMMMMMIIIIIIIIGGGGFFFFFFFFFFFAAAAAPPPPPPPLLLLLLLLTTTTTTTSSSSSSRRRRRRRRRRRGGGGSSSSSSQQQQQQQQQQQQQQQQQQHHHHHHHHHHRRRRRRRRRRRAAAAALLLLLLLLSSSSSSVVVVVVVAAAAAEEEEEEEEELLLLLLLLTTTTTTTQQQQQQQQQQQQQQQQQQMMMMMMMMFFFFFFFFFFFDDDDDDDDAAAAAKKKKKKKKKNNNNNNNNMMMMMMMMMMMMMMMMCCCCCCAAAAASSSSSSDDDDDDDDPPPPPPPRRRRRRRRRRRRRRRRRRRRRRGGGGRRRRRRRRRRRYYYYYYYYYYYYLLLLLLLLTTTTTTTAAAAACCCCCCAAAAAMMMMMMMMFFFFFFFFFFFRRRRRRRRRRRGGGGRRRRRRRRRRRMMMMMMMMSSSSSSTTTTTTTKKKKKKKKKEEEEEEEEEVVVVVVVDDDDDDDDEEEEEEEEEQQQQQQQQQMMMMMMMMSSSSSSMMMMMMMMVVVVVVVQQQQQQQQQNNNNNNNNKKKKKKKKKNNNNNNNNSSSSSSSSSSSSYYYYYYYYYYYYFFFFFFFFFFFVVVVVVVEEEEEEEEEWWWWWWWWWWWWWWIIIIIIIIPPPPPPPHHHHHHHHHHNNNNNNNNTTTTTTTKKKKKKKKKSSSSSSSSSSSSVVVVVVVCCCCCCDDDDDDDDIIIIIIIIPPPPPPPPPPPPPPKKKKKKKKKGGGGLLLLLLLLKKKKKKKKKMMMMMMMMAAAAAVVVVVVVTTTTTTTFFFFFFFFFFFVVVVVVVGGGGNNNNNNNNSSSSSSTTTTTTTAAAAAIIIIIIIIQQQQQQQQQDDDDDDDDMMMMMMMMFFFFFFFFFFFKKKKKKKKKRRRRRRRRRRRVVVVVVVSSSSSSEEEEEEEEEQQQQQQQQQFFFFFFFFFFFTTTTTTTAAAAAMMMMMMMMFFFFFFFFFFFRRRRRRRRRRRRRRRRRRRRRRKKKKKKKKKAAAAAFFFFFFFFFFFLLLLLLLLHHHHHHHHHHWWWWWWWWWWWWWWYYYYYYYYYYYYTTTTTTTGGGGEEEEEEEEEGGGGMMMMMMMMDDDDDDDDEEEEEEEEEMMMMMMMMEEEEEEEEEFFFFFFFFFFFTTTTTTTEEEEEEEEEAAAAAEEEEEEEEESSSSSSNNNNNNNNMMMMMMMMNNNNNNNNDDDDDDDDLLLLLLLLVVVVVVVSSSSSSEEEEEEEEEYYYYYYYYYYYYQQQQQQQQQQQQQQQQQQYYYYYYYYYYYYQQQQQQQQQEEEEEEEEEAAAAATTTTTTTIIIIIIIIDDDDDDDDDDDDDDDDDDDDDDDDAAAAADDDDDDDDDDDDDDDDMMMMMMMMVVVVVVVNNNNNNNNDDDDDDDDYYYYYYYYYYYYY

SEQ ID NO: 206 - protein, 3531 aa, Bombyx mori
MMMMMMMMRRRRRRRRRRREEEEEEEEEIIIIIIIIVVVVVVVHHHHHHHHHHVVVVVVVQQQQQQQQQVVVVVVVGGGGRRRRRRRRRRRCCCCCCGGGGNNNNNNNNQQQQQQQQQIIIIIIIIGGGGSSSSSSKKKKKKKKKFFFFFFFFFFFWWWWWWWWWWWWWWEEEEEEEEEVVVVVVVIIIIIIIISSSSSSDDDDDDDDEEEEEEEEEHHHHHHHHHHGGGGIIIIIIIIDDDDDDDDPPPPPPPCCCCCCGGGGRRRRRRRRRRRYYYYYYYYYYYYHHHHHHHHHHGGGGDDDDDDDDSSSSSSDDDDDDDDLLLLLLLLQQQQQQQQQLLLLLLLLEEEEEEEEERRRRRRRRRRRIIIIIIIINNNNNNNNVVVVVVVYYYYYYYYYYYYYYYYYYYYYYYYNNNNNNNNEEEEEEEEEAAAAAFFFFFFFFFFFGGGGAAAAAKKKKKKKKKYYYYYYYYYYYYVVVVVVVPPPPPPPRRRRRRRRRRRAAAAAVVVVVVVLLLLLLLLVVVVVVVDDDDDDDDLLLLLLLLEEEEEEEEEPPPPPPPSSSSSSTTTTTTTMMMMMMMMDDDDDDDDSSSSSSIIIIIIIIRRRRRRRRRRRGGGGGGGGPPPPPPPYYYYYYYYYYYYGGGGSSSSSSLLLLLLLLYYYYYYYYYYYYRRRRRRRRRRRPPPPPPPDDDDDDDDNNNNNNNNVVVVVVVVVVVVVVCCCCCCGGGGAAAAASSSSSSGGGGAAAAAGGGGNNNNNNNNNNNNNNNNWWWWWWWWWWWWWWAAAAAKKKKKKKKKGGGGHHHHHHHHHHYYYYYYYYYYYYTTTTTTTEEEEEEEEEGGGGAAAAADDDDDDDDLLLLLLLLLLLLLLLLEEEEEEEEETTTTTTTVVVVVVVLLLLLLLLDDDDDDDDVVVVVVVVVVVVVVRRRRRRRRRRRKKKKKKKKKEEEEEEEEEAAAAAEEEEEEEEEGGGGCCCCCCDDDDDDDDCCCCCCLLLLLLLLQQQQQQQQQGGGGFFFFFFFFFFFQQQQQQQQQLLLLLLLLVVVVVVVHHHHHHHHHHSSSSSSLLLLLLLLGGGGGGGGGGGGTTTTTTTGGGGSSSSSSGGGGMMMMMMMMGGGGTTTTTTTLLLLLLLLLLLLLLLLLLLLLLLLAAAAANNNNNNNNLLLLLLLLTTTTTTTDDDDDDDDEEEEEEEEEYYYYYYYYYYYYPPPPPPPDDDDDDDDRRRRRRRRRRRIIIIIIIITTTTTTTAAAAATTTTTTTYYYYYYYYYYYYSSSSSSVVVVVVVVVVVVVVPPPPPPPSSSSSSPPPPPPPTTTTTTTVVVVVVVSSSSSSEEEEEEEEETTTTTTTVVVVVVVVVVVVVVEEEEEEEEEPPPPPPPYYYYYYYYYYYYNNNNNNNNAAAAATTTTTTTLLLLLLLLSSSSSSVVVVVVVNNNNNNNNQQQQQQQQQLLLLLLLLIIIIIIIIEEEEEEEEENNNNNNNNSSSSSSIIIIIIIIQQQQQQQQQSSSSSSYYYYYYYYYYYYCCCCCCIIIIIIIIDDDDDDDDNNNNNNNNEEEEEEEEEAAAAALLLLLLLLYYYYYYYYYYYYYYYYYYYYYYYYIIIIIIIICCCCCCHHHHHHHHHHRRRRRRRRRRRTTTTTTTLLLLLLLLKKKKKKKKKLLLLLLLLMMMMMMMMAAAAAPPPPPPPTTTTTTTYYYYYYYYYYYYGGGGAAAAALLLLLLLLNNNNNNNNHHHHHHHHHHLLLLLLLLVVVVVVVSSSSSSLLLLLLLLTTTTTTTMMMMMMMMSSSSSSGGGGVVVVVVVTTTTTTTTTTTTTTCCCCCCLLLLLLLLRRRRRRRRRRRFFFFFFFFFFFPPPPPPPGGGGQQQQQQQQQLLLLLLLLNNNNNNNNAAAAADDDDDDDDLLLLLLLLRRRRRRRRRRRKKKKKKKKKLLLLLLLLAAAAAVVVVVVVNNNNNNNNMMMMMMMMIIIIIIIIPPPPPPPFFFFFFFFFFFPPPPPPPRRRRRRRRRRRLLLLLLLLHHHHHHHHHHFFFFFFFFFFFFFFFFFFFFFFMMMMMMMMPPPPPPPGGGGFFFFFFFFFFFAAAAAPPPPPPPLLLLLLLLTTTTTTTSSSSSSRRRRRRRRRRRGGGGSSSSSSQQQQQQQQQQQQQQQQQQYYYYYYYYYYYYRRRRRRRRRRRAAAAALLLLLLLLTTTTTTTVVVVVVVPPPPPPPEEEEEEEEELLLLLLLLTTTTTTTQQQQQQQQQQQQQQQQQQMMMMMMMMFFFFFFFFFFFDDDDDDDDAAAAAKKKKKKKKKNNNNNNNNMMMMMMMMMMMMMMMMAAAAAAAAAACCCCCCDDDDDDDDPPPPPPPHHHHHHHHHHRRRRRRRRRRRGGGGRRRRRRRRRRRYYYYYYYYYYYYLLLLLLLLTTTTTTTVVVVVVVAAAAATTTTTTTVVVVVVVFFFFFFFFFFFRRRRRRRRRRRGGGGRRRRRRRRRRRMMMMMMMMSSSSSSMMMMMMMMKKKKKKKKKEEEEEEEEEIIIIIIIIDDDDDDDDEEEEEEEEEQQQQQQQQQIIIIIIIILLLLLLLLNNNNNNNNVVVVVVVQQQQQQQQQKKKKKKKKKKKKKKKKKKNNNNNNNNKKKKKKKKKDDDDDDDDFFFFFFFFFFFFFFFFFFFFFFVVVVVVVEEEEEEEEEWWWWWWWWWWWWWWIIIIIIIIPPPPPPPNNNNNNNNNNNNNNNNVVVVVVVQQQQQQQQQTTTTTTTAAAAAVVVVVVVCCCCCCDDDDDDDDIIIIIIIIPPPPPPPPPPPPPPRRRRRRRRRRRGGGGMMMMMMMMKKKKKKKKKMMMMMMMMSSSSSSAAAAATTTTTTTFFFFFFFFFFFIIIIIIIIGGGGNNNNNNNNTTTTTTTTTTTTTTAAAAAIIIIIIIIQQQQQQQQQEEEEEEEEEIIIIIIIIFFFFFFFFFFFKKKKKKKKKRRRRRRRRRRRIIIIIIIISSSSSSEEEEEEEEEQQQQQQQQQFFFFFFFFFFFAAAAAAAAAAMMMMMMMMFFFFFFFFFFFSSSSSSRRRRRRRRRRRKKKKKKKKKAAAAAFFFFFFFFFFFLLLLLLLLHHHHHHHHHHWWWWWWWWWWWWWWYYYYYYYYYYYYTTTTTTTGGGGEEEEEEEEEGGGGMMMMMMMMEEEEEEEEEEEEEEEEEEGGGGDDDDDDDDFFFFFFFFFFFAAAAAEEEEEEEEEAAAAADDDDDDDDNNNNNNNNNNNNNNNNVVVVVVVSSSSSSDDDDDDDDLLLLLLLLLLLLLLLLSSSSSSEEEEEEEEEYYYYYYYYYYYYQQQQQQQQQQQQQQQQQQYYYYYYYYYYYYQQQQQQQQQDDDDDDDDAAAAATTTTTTTIIIIIIIIDDDDDDDDQQQQQQQQQEEEEEEEEEFFFFFFFFFFFEEEEEEEEEDDDDDDDDEEEEEEEEEEEEEEEEEEEEEEEEEEEVVVVVVVEEEEEEEEEEEEEEEEEEQQQQQQQQQNNNNNNNNDDDDDDDDDDDDDDDDSSSSSSDDDDDDDDEEEEEEEEEQQQQQQQQQQ

SEQ ID NO: 207 - protein, 3491 aa, Botryotinia fuckeliana
MMMMMMMMRRRRRRRRRRREEEEEEEEEIIIIIIIIVVVVVVVHHHHHHHHHHLLLLLLLLQQQQQQQQQTTTTTTTGGGGQQQQQQQQQCCCCCCGGGGNNNNNNNNQQQQQQQQQIIIIIIIIGGGGAAAAAAAAAAFFFFFFFFFFFWWWWWWWWWWWWWWQQQQQQQQQTTTTTTTIIIIIIIISSSSSSGGGGEEEEEEEEEHHHHHHHHHHGGGGLLLLLLLLDDDDDDDDGGGGSSSSSSGGGGVVVVVVVYYYYYYYYYYYYNNNNNNNNGGGGTTTTTTTSSSSSSDDDDDDDDLLLLLLLLQQQQQQQQQLLLLLLLLEEEEEEEEERRRRRRRRRRRMMMMMMMMNNNNNNNNVVVVVVVYYYYYYYYYYYYFFFFFFFFFFFNNNNNNNNEEEEEEEEEAAAAASSSSSSGGGGNNNNNNNNKKKKKKKKKYYYYYYYYYYYYVVVVVVVPPPPPPPRRRRRRRRRRRAAAAAVVVVVVVLLLLLLLLVVVVVVVDDDDDDDDLLLLLLLLEEEEEEEEEPPPPPPPGGGGTTTTTTTMMMMMMMMDDDDDDDDAAAAAVVVVVVVRRRRRRRRRRRAAAAAGGGGPPPPPPPFFFFFFFFFFFGGGGQQQQQQQQQLLLLLLLLFFFFFFFFFFFRRRRRRRRRRRPPPPPPPDDDDDDDDNNNNNNNNFFFFFFFFFFFVVVVVVVFFFFFFFFFFFGGGGQQQQQQQQQSSSSSSGGGGAAAAAGGGGNNNNNNNNNNNNNNNNWWWWWWWWWWWWWWAAAAAKKKKKKKKKGGGGHHHHHHHHHHYYYYYYYYYYYYTTTTTTTEEEEEEEEEGGGGAAAAAEEEEEEEEELLLLLLLLVVVVVVVDDDDDDDDQQQQQQQQQVVVVVVVLLLLLLLLDDDDDDDDVVVVVVVVVVVVVVRRRRRRRRRRRRRRRRRRRRRREEEEEEEEEAAAAAEEEEEEEEEGGGGCCCCCCDDDDDDDDCCCCCCLLLLLLLLQQQQQQQQQGGGGFFFFFFFFFFFQQQQQQQQQIIIIIIIITTTTTTTHHHHHHHHHHSSSSSSLLLLLLLLGGGGGGGGGGGGTTTTTTTGGGGAAAAAGGGGMMMMMMMMGGGGTTTTTTTLLLLLLLLLLLLLLLLIIIIIIIISSSSSSKKKKKKKKKIIIIIIIIRRRRRRRRRRREEEEEEEEEEEEEEEEEEFFFFFFFFFFFPPPPPPPDDDDDDDDRRRRRRRRRRRMMMMMMMMMMMMMMMMAAAAATTTTTTTFFFFFFFFFFFSSSSSSVVVVVVVVVVVVVVPPPPPPPSSSSSSPPPPPPPKKKKKKKKKVVVVVVVSSSSSSDDDDDDDDTTTTTTTVVVVVVVVVVVVVVEEEEEEEEEPPPPPPPYYYYYYYYYYYYNNNNNNNNAAAAATTTTTTTLLLLLLLLSSSSSSVVVVVVVHHHHHHHHHHQQQQQQQQQLLLLLLLLVVVVVVVEEEEEEEEENNNNNNNNSSSSSSDDDDDDDDEEEEEEEEETTTTTTTFFFFFFFFFFFCCCCCCIIIIIIIIDDDDDDDDNNNNNNNNEEEEEEEEEAAAAALLLLLLLLYYYYYYYYYYYYDDDDDDDDIIIIIIIICCCCCCMMMMMMMMRRRRRRRRRRRTTTTTTTLLLLLLLLKKKKKKKKKLLLLLLLLSSSSSSNNNNNNNNPPPPPPPSSSSSSYYYYYYYYYYYYGGGGDDDDDDDDLLLLLLLLNNNNNNNNHHHHHHHHHHLLLLLLLLVVVVVVVSSSSSSAAAAAVVVVVVVMMMMMMMMSSSSSSGGGGVVVVVVVTTTTTTTTTTTTTTCCCCCCLLLLLLLLRRRRRRRRRRRFFFFFFFFFFFPPPPPPPGGGGQQQQQQQQQLLLLLLLLNNNNNNNNSSSSSSDDDDDDDDLLLLLLLLRRRRRRRRRRRKKKKKKKKKLLLLLLLLAAAAAVVVVVVVNNNNNNNNMMMMMMMMVVVVVVVPPPPPPPFFFFFFFFFFFPPPPPPPRRRRRRRRRRRLLLLLLLLHHHHHHHHHHFFFFFFFFFFFFFFFFFFFFFFMMMMMMMMVVVVVVVGGGGFFFFFFFFFFFAAAAAPPPPPPPLLLLLLLLTTTTTTTSSSSSSRRRRRRRRRRRGGGGAAAAAHHHHHHHHHHSSSSSSFFFFFFFFFFFRRRRRRRRRRRAAAAAVVVVVVVTTTTTTTVVVVVVVPPPPPPPEEEEEEEEELLLLLLLLTTTTTTTQQQQQQQQQQQQQQQQQQMMMMMMMMYYYYYYYYYYYYDDDDDDDDPPPPPPPKKKKKKKKKNNNNNNNNMMMMMMMMMMMMMMMMAAAAAAAAAASSSSSSDDDDDDDDFFFFFFFFFFFRRRRRRRRRRRNNNNNNNNGGGGRRRRRRRRRRRYYYYYYYYYYYYLLLLLLLLTTTTTTTCCCCCCSSSSSSAAAAAIIIIIIIIFFFFFFFFFFFRRRRRRRRRRRGGGGKKKKKKKKKVVVVVVVSSSSSSMMMMMMMMKKKKKKKKKEEEEEEEEEVVVVVVVEEEEEEEEEDDDDDDDDQQQQQQQQQMMMMMMMMRRRRRRRRRRRNNNNNNNNVVVVVVVQQQQQQQQQNNNNNNNNKKKKKKKKKNNNNNNNNSSSSSSSSSSSSYYYYYYYYYYYYFFFFFFFFFFFVVVVVVVEEEEEEEEEWWWWWWWWWWWWWWIIIIIIIIPPPPPPPNNNNNNNNNNNNNNNNVVVVVVVQQQQQQQQQTTTTTTTAAAAALLLLLLLLCCCCCCSSSSSSIIIIIIIIPPPPPPPPPPPPPPRRRRRRRRRRRGGGGLLLLLLLLKKKKKKKKKMMMMMMMMSSSSSSSSSSSSTTTTTTTFFFFFFFFFFFVVVVVVVGGGGNNNNNNNNSSSSSSTTTTTTTSSSSSSIIIIIIIIQQQQQQQQQEEEEEEEEELLLLLLLLFFFFFFFFFFFKKKKKKKKKRRRRRRRRRRRVVVVVVVGGGGDDDDDDDDQQQQQQQQQFFFFFFFFFFFTTTTTTTAAAAAMMMMMMMMFFFFFFFFFFFRRRRRRRRRRRRRRRRRRRRRRKKKKKKKKKAAAAAFFFFFFFFFFFLLLLLLLLHHHHHHHHHHWWWWWWWWWWWWWWYYYYYYYYYYYYTTTTTTTGGGGEEEEEEEEEGGGGMMMMMMMMDDDDDDDDEEEEEEEEEMMMMMMMMEEEEEEEEEFFFFFFFFFFFTTTTTTTEEEEEEEEEAAAAAEEEEEEEEESSSSSSNNNNNNNNMMMMMMMMNNNNNNNNDDDDDDDDLLLLLLLLVVVVVVVSSSSSSEEEEEEEEEYYYYYYYYYYYYQQQQQQQQQQQQQQQQQQYYYYYYYYYYYYQQQQQQQQQDDDDDDDDAAAAASSSSSSIIIIIIIISSSSSSEEEEEEEEEGGGGEEEEEEEEEEEEEEEEEEEEEEEEEEEYYYYYYYYYYYYEEEEEEEEEEEEEEEEEEEEEEEEEEEVVVVVVVPPPPPPPIIIIIIIIEEEEEEEEEGGGGEEEEEEEEEEEEEEEEEEE

SEQ ID NO: 208 - protein, 3505 aa, Candida albicans
MMMMMMMMRRRRRRRRRRREEEEEEEEEIIIIIIIIIIIIIIIIHHHHHHHHHHLLLLLLLLSSSSSSTTTTTTTGGGGQQQQQQQQQCCCCCCGGGGNNNNNNNNQQQQQQQQQIIIIIIIIGGGGAAAAAAAAAAFFFFFFFFFFFWWWWWWWWWWWWWWEEEEEEEEETTTTTTTIIIIIIIICCCCCCGGGGEEEEEEEEEHHHHHHHHHHGGGGLLLLLLLLDDDDDDDDNNNNNNNNNNNNNNNNGGGGTTTTTTTYYYYYYYYYYYYVVVVVVVGGGGNNNNNNNNNNNNNNNNEEEEEEEEELLLLLLLLQQQQQQQQQKKKKKKKKKSSSSSSKKKKKKKKKLLLLLLLLDDDDDDDDVVVVVVVYYYYYYYYYYYYFFFFFFFFFFFNNNNNNNNEEEEEEEEEAAAAATTTTTTTSSSSSSGGGGKKKKKKKKKYYYYYYYYYYYYVVVVVVVPPPPPPPRRRRRRRRRRRAAAAAVVVVVVVLLLLLLLLVVVVVVVDDDDDDDDLLLLLLLLEEEEEEEEEPPPPPPPGGGGTTTTTTTIIIIIIIIDDDDDDDDNNNNNNNNVVVVVVVKKKKKKKKKTTTTTTTSSSSSSQQQQQQQQQIIIIIIIIGGGGNNNNNNNNLLLLLLLLFFFFFFFFFFFRRRRRRRRRRRPPPPPPPDDDDDDDDNNNNNNNNFFFFFFFFFFFIIIIIIIIFFFFFFFFFFFGGGGQQQQQQQQQSSSSSSSSSSSSAAAAAGGGGNNNNNNNNVVVVVVVWWWWWWWWWWWWWWAAAAAKKKKKKKKKGGGGHHHHHHHHHHYYYYYYYYYYYYTTTTTTTEEEEEEEEEGGGGAAAAAEEEEEEEEELLLLLLLLVVVVVVVDDDDDDDDSSSSSSVVVVVVVLLLLLLLLDDDDDDDDVVVVVVVVVVVVVVRRRRRRRRRRRRRRRRRRRRRREEEEEEEEEAAAAAEEEEEEEEEGGGGCCCCCCDDDDDDDDSSSSSSLLLLLLLLQQQQQQQQQGGGGFFFFFFFFFFFQQQQQQQQQIIIIIIIITTTTTTTHHHHHHHHHHSSSSSSLLLLLLLLGGGGGGGGGGGGTTTTTTTGGGGSSSSSSGGGGMMMMMMMMGGGGTTTTTTTLLLLLLLLLLLLLLLLIIIIIIIISSSSSSKKKKKKKKKIIIIIIIIRRRRRRRRRRREEEEEEEEEEEEEEEEEEFFFFFFFFFFFPPPPPPPDDDDDDDDTTTTTTTMMMMMMMMMMMMMMMMAAAAATTTTTTTFFFFFFFFFFFSSSSSSVVVVVVVVVVVVVVPPPPPPPSSSSSSPPPPPPPKKKKKKKKKVVVVVVVSSSSSSDDDDDDDDTTTTTTTVVVVVVVIIIIIIIIEEEEEEEEEPPPPPPPYYYYYYYYYYYYNNNNNNNNAAAAATTTTTTTLLLLLLLLSSSSSSVVVVVVVHHHHHHHHHHQQQQQQQQQLLLLLLLLVVVVVVVEEEEEEEEENNNNNNNNSSSSSSDDDDDDDDEEEEEEEEETTTTTTTFFFFFFFFFFFCCCCCCIIIIIIIIDDDDDDDDNNNNNNNNEEEEEEEEEAAAAALLLLLLLLYYYYYYYYYYYYNNNNNNNNIIIIIIIICCCCCCQQQQQQQQQNNNNNNNNTTTTTTTLLLLLLLLKKKKKKKKKLLLLLLLLPPPPPPPQQQQQQQQQPPPPPPPSSSSSSYYYYYYYYYYYYAAAAAEEEEEEEEELLLLLLLLNNNNNNNNNNNNNNNNLLLLLLLLVVVVVVVSSSSSSSSSSSSVVVVVVVMMMMMMMMSSSSSSGGGGVVVVVVVTTTTTTTTTTTTTTSSSSSSLLLLLLLLRRRRRRRRRRRYYYYYYYYYYYYPPPPPPPGGGGQQQQQQQQQLLLLLLLLNNNNNNNNSSSSSSDDDDDDDDLLLLLLLLRRRRRRRRRRRKKKKKKKKKLLLLLLLLAAAAAVVVVVVVNNNNNNNNLLLLLLLLVVVVVVVPPPPPPPFFFFFFFFFFFPPPPPPPRRRRRRRRRRRLLLLLLLLHHHHHHHHHHFFFFFFFFFFFFFFFFFFFFFFMMMMMMMMVVVVVVVGGGGYYYYYYYYYYYYAAAAAPPPPPPPLLLLLLLLTTTTTTTSSSSSSMMMMMMMMGGGGSSSSSSKKKKKKKKKSSSSSSFFFFFFFFFFFRRRRRRRRRRRSSSSSSVVVVVVVTTTTTTTVVVVVVVPPPPPPPEEEEEEEEELLLLLLLLTTTTTTTQQQQQQQQQQQQQQQQQQMMMMMMMMFFFFFFFFFFFDDDDDDDDAAAAAKKKKKKKKKNNNNNNNNMMMMMMMMMMMMMMMMAAAAAAAAAASSSSSSDDDDDDDDPPPPPPPRRRRRRRRRRRNNNNNNNNGGGGRRRRRRRRRRRYYYYYYYYYYYYLLLLLLLLTTTTTTTVVVVVVVAAAAAAAAAAFFFFFFFFFFFFFFFFFFFFFFRRRRRRRRRRRGGGGKKKKKKKKKVVVVVVVSSSSSSVVVVVVVKKKKKKKKKEEEEEEEEEVVVVVVVDDDDDDDDDDDDDDDDEEEEEEEEEMMMMMMMMHHHHHHHHHHKKKKKKKKKIIIIIIIIQQQQQQQQQTTTTTTTRRRRRRRRRRRNNNNNNNNSSSSSSSSSSSSYYYYYYYYYYYYFFFFFFFFFFFVVVVVVVDDDDDDDDWWWWWWWWWWWWWWIIIIIIIIPPPPPPPNNNNNNNNNNNNNNNNVVVVVVVQQQQQQQQQTTTTTTTAAAAAVVVVVVVCCCCCCSSSSSSVVVVVVVPPPPPPPPPPPPPPKKKKKKKKKDDDDDDDDLLLLLLLLDDDDDDDDMMMMMMMMSSSSSSAAAAATTTTTTTFFFFFFFFFFFIIIIIIIIGGGGNNNNNNNNSSSSSSTTTTTTTSSSSSSIIIIIIIIQQQQQQQQQEEEEEEEEELLLLLLLLFFFFFFFFFFFKKKKKKKKKRRRRRRRRRRRVVVVVVVGGGGDDDDDDDDQQQQQQQQQFFFFFFFFFFFSSSSSSAAAAAMMMMMMMMFFFFFFFFFFFRRRRRRRRRRRRRRRRRRRRRRKKKKKKKKKAAAAAFFFFFFFFFFFLLLLLLLLHHHHHHHHHHWWWWWWWWWWWWWWYYYYYYYYYYYYTTTTTTTSSSSSSEEEEEEEEEGGGGMMMMMMMMDDDDDDDDEEEEEEEEEMMMMMMMMEEEEEEEEEFFFFFFFFFFFTTTTTTTEEEEEEEEEAAAAAEEEEEEEEESSSSSSNNNNNNNNMMMMMMMMNNNNNNNNDDDDDDDDLLLLLLLLVVVVVVVSSSSSSEEEEEEEEEYYYYYYYYYYYYQQQQQQQQQQQQQQQQQQYYYYYYYYYYYYQQQQQQQQQEEEEEEEEEAAAAASSSSSSIIIIIIIIDDDDDDDDEEEEEEEEEEEEEEEEEEEEEEEEEEELLLLLLLLEEEEEEEEEYYYYYYYYYYYYAAAAADDDDDDDDEEEEEEEEEIIIIIIIIPPPPPPPLLLLLLLLEEEEEEEEEDDDDDDDDAAAAAAAAAAMMMMMMMMEEEEEEEEEE

SEQ ID NO: 209 - protein, 3498 aa, Acremonium chrysogenum
MMMMMMMMRRRRRRRRRRREEEEEEEEEIIIIIIIIVVVVVVVHHHHHHHHHHLLLLLLLLQQQQQQQQQTTTTTTTGGGGQQQQQQQQQCCCCCCGGGGNNNNNNNNQQQQQQQQQIIIIIIIIGGGGAAAAAAAAAAFFFFFFFFFFFWWWWWWWWWWWWWWQQQQQQQQQTTTTTTTIIIIIIIISSSSSSGGGGEEEEEEEEEHHHHHHHHHHGGGGLLLLLLLLDDDDDDDDSSSSSSNNNNNNNNGGGGVVVVVVVYYYYYYYYYYYYNNNNNNNNGGGGSSSSSSSSSSSSEEEEEEEEELLLLLLLLQQQQQQQQQLLLLLLLLEEEEEEEEERRRRRRRRRRRMMMMMMMMSSSSSSVVVVVVVYYYYYYYYYYYYFFFFFFFFFFFNNNNNNNNEEEEEEEEEAAAAASSSSSSGGGGNNNNNNNNKKKKKKKKKYYYYYYYYYYYYVVVVVVVPPPPPPPRRRRRRRRRRRAAAAAVVVVVVVLLLLLLLLVVVVVVVDDDDDDDDLLLLLLLLEEEEEEEEEPPPPPPPGGGGTTTTTTTMMMMMMMMDDDDDDDDAAAAAVVVVVVVRRRRRRRRRRRAAAAAGGGGPPPPPPPFFFFFFFFFFFGGGGQQQQQQQQQLLLLLLLLFFFFFFFFFFFRRRRRRRRRRRPPPPPPPDDDDDDDDNNNNNNNNFFFFFFFFFFFVVVVVVVFFFFFFFFFFFGGGGQQQQQQQQQSSSSSSGGGGAAAAAGGGGNNNNNNNNNNNNNNNNWWWWWWWWWWWWWWAAAAAKKKKKKKKKGGGGHHHHHHHHHHYYYYYYYYYYYYTTTTTTTEEEEEEEEEGGGGAAAAAEEEEEEEEELLLLLLLLVVVVVVVDDDDDDDDNNNNNNNNVVVVVVVLLLLLLLLDDDDDDDDVVVVVVVVVVVVVVRRRRRRRRRRRRRRRRRRRRRREEEEEEEEEAAAAAEEEEEEEEEGGGGCCCCCCDDDDDDDDCCCCCCLLLLLLLLQQQQQQQQQGGGGFFFFFFFFFFFQQQQQQQQQIIIIIIIITTTTTTTHHHHHHHHHHSSSSSSLLLLLLLLGGGGGGGGGGGGTTTTTTTGGGGAAAAAGGGGMMMMMMMMGGGGTTTTTTTLLLLLLLLLLLLLLLLIIIIIIIISSSSSSKKKKKKKKKIIIIIIIIRRRRRRRRRRREEEEEEEEEEEEEEEEEEFFFFFFFFFFFPPPPPPPDDDDDDDDRRRRRRRRRRRMMMMMMMMMMMMMMMMAAAAATTTTTTTFFFFFFFFFFFSSSSSSVVVVVVVVVVVVVVPPPPPPPSSSSSSPPPPPPPKKKKKKKKKVVVVVVVSSSSSSDDDDDDDDTTTTTTTVVVVVVVVVVVVVVEEEEEEEEEPPPPPPPYYYYYYYYYYYYNNNNNNNNAAAAATTTTTTTLLLLLLLLSSSSSSVVVVVVVHHHHHHHHHHQQQQQQQQQLLLLLLLLVVVVVVVEEEEEEEEEHHHHHHHHHHSSSSSSDDDDDDDDEEEEEEEEETTTTTTTFFFFFFFFFFFCCCCCCIIIIIIIIDDDDDDDDNNNNNNNNEEEEEEEEEAAAAALLLLLLLLYYYYYYYYYYYYDDDDDDDDIIIIIIIICCCCCCMMMMMMMMRRRRRRRRRRRTTTTTTTLLLLLLLLKKKKKKKKKLLLLLLLLSSSSSSNNNNNNNNPPPPPPPSSSSSSYYYYYYYYYYYYGGGGDDDDDDDDLLLLLLLLNNNNNNNNYYYYYYYYYYYYLLLLLLLLVVVVVVVSSSSSSAAAAAVVVVVVVMMMMMMMMSSSSSSGGGGVVVVVVVTTTTTTTTTTTTTTCCCCCCLLLLLLLLRRRRRRRRRRRFFFFFFFFFFFPPPPPPPGGGGQQQQQQQQQLLLLLLLLNNNNNNNNSSSSSSDDDDDDDDLLLLLLLLRRRRRRRRRRRKKKKKKKKKLLLLLLLLAAAAAVVVVVVVNNNNNNNNMMMMMMMMVVVVVVVPPPPPPPFFFFFFFFFFFPPPPPPPRRRRRRRRRRRLLLLLLLLHHHHHHHHHHFFFFFFFFFFFFFFFFFFFFFFMMMMMMMMVVVVVVVGGGGFFFFFFFFFFFAAAAAPPPPPPPLLLLLLLLTTTTTTTSSSSSSRRRRRRRRRRRGGGGAAAAAHHHHHHHHHHSSSSSSFFFFFFFFFFFRRRRRRRRRRRAAAAAVVVVVVVSSSSSSVVVVVVVPPPPPPPEEEEEEEEELLLLLLLLTTTTTTTQQQQQQQQQQQQQQQQQQMMMMMMMMFFFFFFFFFFFDDDDDDDDPPPPPPPKKKKKKKKKNNNNNNNNMMMMMMMMMMMMMMMMAAAAAAAAAASSSSSSDDDDDDDDFFFFFFFFFFFRRRRRRRRRRRNNNNNNNNGGGGRRRRRRRRRRRYYYYYYYYYYYYLLLLLLLLTTTTTTTCCCCCCSSSSSSAAAAAIIIIIIIIFFFFFFFFFFFRRRRRRRRRRRGGGGKKKKKKKKKVVVVVVVAAAAAMMMMMMMMKKKKKKKKKEEEEEEEEEVVVVVVVEEEEEEEEEDDDDDDDDQQQQQQQQQMMMMMMMMRRRRRRRRRRRNNNNNNNNVVVVVVVQQQQQQQQQSSSSSSKKKKKKKKKNNNNNNNNSSSSSSSSSSSSYYYYYYYYYYYYFFFFFFFFFFFVVVVVVVEEEEEEEEEWWWWWWWWWWWWWWIIIIIIIIPPPPPPPNNNNNNNNNNNNNNNNIIIIIIIIQQQQQQQQQTTTTTTTAAAAALLLLLLLLCCCCCCAAAAAIIIIIIIIPPPPPPPPPPPPPPRRRRRRRRRRRGGGGLLLLLLLLKKKKKKKKKMMMMMMMMSSSSSSSSSSSSTTTTTTTFFFFFFFFFFFIIIIIIIIGGGGNNNNNNNNSSSSSSTTTTTTTSSSSSSIIIIIIIIQQQQQQQQQEEEEEEEEELLLLLLLLFFFFFFFFFFFKKKKKKKKKRRRRRRRRRRRVVVVVVVGGGGDDDDDDDDQQQQQQQQQFFFFFFFFFFFTTTTTTTAAAAAMMMMMMMMFFFFFFFFFFFRRRRRRRRRRRRRRRRRRRRRRKKKKKKKKKAAAAAFFFFFFFFFFFLLLLLLLLHHHHHHHHHHWWWWWWWWWWWWWWYYYYYYYYYYYYTTTTTTTGGGGEEEEEEEEEGGGGMMMMMMMMDDDDDDDDEEEEEEEEEMMMMMMMMEEEEEEEEEFFFFFFFFFFFTTTTTTTEEEEEEEEEAAAAAEEEEEEEEESSSSSSNNNNNNNNMMMMMMMMNNNNNNNNDDDDDDDDLLLLLLLLVVVVVVVSSSSSSEEEEEEEEEYYYYYYYYYYYYQQQQQQQQQQQQQQQQQQYYYYYYYYYYYYQQQQQQQQQDDDDDDDDAAAAAGGGGIIIIIIIIDDDDDDDDEEEEEEEEEEEEEEEEEEEEEEEEEEEEEEEEEEEEEEEEEEEEEYYYYYYYYYYYYEEEEEEEEEEEEEEEEEEEEEEEEEEELLLLLLLLPPPPPPPLLLLLLLLEEEEEEEEEGGGGEEEEEEEEEEEEEEEEEEE

SEQ ID NO: 210 - protein, 3475 aa, Chlamydomonas incerta
MMMMMMMMRRRRRRRRRRREEEEEEEEEIIIIIIIIVVVVVVVHHHHHHHHHHIIIIIIIIQQQQQQQQQGGGGGGGGQQQQQQQQQCCCCCCGGGGNNNNNNNNQQQQQQQQQIIIIIIIIGGGGAAAAAKKKKKKKKKFFFFFFFFFFFWWWWWWWWWWWWWWEEEEEEEEEVVVVVVVVVVVVVVSSSSSSDDDDDDDDEEEEEEEEEHHHHHHHHHHGGGGVVVVVVVDDDDDDDDPPPPPPPTTTTTTTGGGGTTTTTTTYYYYYYYYYYYYHHHHHHHHHHGGGGDDDDDDDDSSSSSSDDDDDDDDLLLLLLLLQQQQQQQQQLLLLLLLLEEEEEEEEERRRRRRRRRRRIIIIIIIINNNNNNNNVVVVVVVYYYYYYYYYYYYFFFFFFFFFFFNNNNNNNNEEEEEEEEEAAAAATTTTTTTGGGGGGGGRRRRRRRRRRRYYYYYYYYYYYYVVVVVVVPPPPPPPRRRRRRRRRRRAAAAAIIIIIIIILLLLLLLLMMMMMMMMDDDDDDDDLLLLLLLLEEEEEEEEEPPPPPPPGGGGTTTTTTTMMMMMMMMDDDDDDDDSSSSSSVVVVVVVRRRRRRRRRRRSSSSSSGGGGPPPPPPPYYYYYYYYYYYYGGGGQQQQQQQQQIIIIIIIIFFFFFFFFFFFRRRRRRRRRRRPPPPPPPDDDDDDDDNNNNNNNNFFFFFFFFFFFVVVVVVVFFFFFFFFFFFGGGGQQQQQQQQQTTTTTTTGGGGAAAAAGGGGNNNNNNNNNNNNNNNNWWWWWWWWWWWWWWAAAAAKKKKKKKKKGGGGHHHHHHHHHHYYYYYYYYYYYYTTTTTTTEEEEEEEEEGGGGAAAAAEEEEEEEEELLLLLLLLIIIIIIIIDDDDDDDDSSSSSSVVVVVVVLLLLLLLLDDDDDDDDVVVVVVVVVVVVVVRRRRRRRRRRRKKKKKKKKKEEEEEEEEEAAAAAEEEEEEEEESSSSSSCCCCCCDDDDDDDDCCCCCCLLLLLLLLQQQQQQQQQGGGGFFFFFFFFFFFQQQQQQQQQVVVVVVVCCCCCCHHHHHHHHHHSSSSSSLLLLLLLLGGGGGGGGGGGGTTTTTTTGGGGSSSSSSGGGGMMMMMMMMGGGGTTTTTTTLLLLLLLLLLLLLLLLIIIIIIIISSSSSSKKKKKKKKKIIIIIIIIRRRRRRRRRRREEEEEEEEEEEEEEEEEEYYYYYYYYYYYYPPPPPPPDDDDDDDDRRRRRRRRRRRMMMMMMMMMMMMMMMMLLLLLLLLTTTTTTTFFFFFFFFFFFSSSSSSVVVVVVVVVVVVVVPPPPPPPSSSSSSPPPPPPPKKKKKKKKKVVVVVVVSSSSSSDDDDDDDDTTTTTTTVVVVVVVVVVVVVVEEEEEEEEEPPPPPPPYYYYYYYYYYYYNNNNNNNNAAAAATTTTTTTLLLLLLLLSSSSSSVVVVVVVHHHHHHHHHHQQQQQQQQQLLLLLLLLVVVVVVVEEEEEEEEENNNNNNNNAAAAADDDDDDDDEEEEEEEEECCCCCCMMMMMMMMVVVVVVVLLLLLLLLDDDDDDDDNNNNNNNNEEEEEEEEEAAAAALLLLLLLLYYYYYYYYYYYYDDDDDDDDIIIIIIIICCCCCCFFFFFFFFFFFRRRRRRRRRRRTTTTTTTLLLLLLLLKKKKKKKKKLLLLLLLLTTTTTTTTTTTTTTPPPPPPPTTTTTTTFFFFFFFFFFFGGGGDDDDDDDDLLLLLLLLNNNNNNNNHHHHHHHHHHLLLLLLLLIIIIIIIISSSSSSAAAAAVVVVVVVMMMMMMMMSSSSSSGGGGIIIIIIIITTTTTTTCCCCCCCCCCCCLLLLLLLLRRRRRRRRRRRFFFFFFFFFFFPPPPPPPGGGGQQQQQQQQQLLLLLLLLNNNNNNNNAAAAADDDDDDDDLLLLLLLLRRRRRRRRRRRKKKKKKKKKLLLLLLLLAAAAAVVVVVVVNNNNNNNNLLLLLLLLIIIIIIIIPPPPPPPFFFFFFFFFFFPPPPPPPRRRRRRRRRRRLLLLLLLLHHHHHHHHHHFFFFFFFFFFFFFFFFFFFFFFMMMMMMMMVVVVVVVGGGGFFFFFFFFFFFTTTTTTTPPPPPPPLLLLLLLLTTTTTTTSSSSSSRRRRRRRRRRRGGGGSSSSSSQQQQQQQQQQQQQQQQQQYYYYYYYYYYYYRRRRRRRRRRRAAAAALLLLLLLLTTTTTTTVVVVVVVPPPPPPPEEEEEEEEELLLLLLLLTTTTTTTQQQQQQQQQQQQQQQQQQMMMMMMMMWWWWWWWWWWWWWWDDDDDDDDAAAAAKKKKKKKKKNNNNNNNNMMMMMMMMMMMMMMMMCCCCCCAAAAAAAAAADDDDDDDDPPPPPPPRRRRRRRRRRRHHHHHHHHHHGGGGRRRRRRRRRRRYYYYYYYYYYYYLLLLLLLLTTTTTTTAAAAASSSSSSAAAAALLLLLLLLFFFFFFFFFFFRRRRRRRRRRRGGGGRRRRRRRRRRRMMMMMMMMSSSSSSTTTTTTTKKKKKKKKKEEEEEEEEEVVVVVVVDDDDDDDDEEEEEEEEEQQQQQQQQQMMMMMMMMLLLLLLLLNNNNNNNNVVVVVVVQQQQQQQQQNNNNNNNNKKKKKKKKKNNNNNNNNSSSSSSSSSSSSYYYYYYYYYYYYFFFFFFFFFFFVVVVVVVEEEEEEEEEWWWWWWWWWWWWWWIIIIIIIIPPPPPPPNNNNNNNNNNNNNNNNVVVVVVVKKKKKKKKKSSSSSSSSSSSSVVVVVVVCCCCCCDDDDDDDDIIIIIIIIPPPPPPPPPPPPPPKKKKKKKKKGGGGLLLLLLLLKKKKKKKKKMMMMMMMMSSSSSSAAAAATTTTTTTFFFFFFFFFFFIIIIIIIIGGGGNNNNNNNNSSSSSSTTTTTTTAAAAAIIIIIIIIQQQQQQQQQEEEEEEEEEMMMMMMMMFFFFFFFFFFFKKKKKKKKKRRRRRRRRRRRVVVVVVVSSSSSSEEEEEEEEEQQQQQQQQQFFFFFFFFFFFTTTTTTTAAAAAMMMMMMMMFFFFFFFFFFFRRRRRRRRRRRRRRRRRRRRRRKKKKKKKKKAAAAAFFFFFFFFFFFLLLLLLLLHHHHHHHHHHWWWWWWWWWWWWWWYYYYYYYYYYYYTTTTTTTGGGGEEEEEEEEEGGGGMMMMMMMMDDDDDDDDEEEEEEEEEMMMMMMMMEEEEEEEEEFFFFFFFFFFFTTTTTTTEEEEEEEEEAAAAAEEEEEEEEESSSSSSNNNNNNNNMMMMMMMMNNNNNNNNDDDDDDDDLLLLLLLLVVVVVVVSSSSSSEEEEEEEEEYYYYYYYYYYYYQQQQQQQQQQQQQQQQQQYYYYYYYYYYYYQQQQQQQQQDDDDDDDDAAAAASSSSSSAAAAAEEEEEEEEEEEEEEEEEEEEEEEEEEEGGGGEEEEEEEEEFFFFFFFFFFFEEEEEEEEEGGGGEEEEEEEEEEEEEEEEEEEEEEEEEEEEEEEEEEEEAAAAAA

SEQ ID NO: 211 - protein, 3476 aa, Chlamydomonas reinhardtii
MMMMMMMMRRRRRRRRRRREEEEEEEEEIIIIIIIIVVVVVVVHHHHHHHHHHIIIIIIIIQQQQQQQQQGGGGGGGGQQQQQQQQQCCCCCCGGGGNNNNNNNNQQQQQQQQQIIIIIIIIGGGGAAAAAKKKKKKKKKFFFFFFFFFFFWWWWWWWWWWWWWWEEEEEEEEEVVVVVVVVVVVVVVSSSSSSDDDDDDDDEEEEEEEEEHHHHHHHHHHGGGGIIIIIIIIDDDDDDDDPPPPPPPTTTTTTTGGGGTTTTTTTYYYYYYYYYYYYHHHHHHHHHHGGGGDDDDDDDDSSSSSSDDDDDDDDLLLLLLLLQQQQQQQQQLLLLLLLLEEEEEEEEERRRRRRRRRRRIIIIIIIINNNNNNNNVVVVVVVYYYYYYYYYYYYFFFFFFFFFFFNNNNNNNNEEEEEEEEEAAAAATTTTTTTGGGGGGGGRRRRRRRRRRRYYYYYYYYYYYYVVVVVVVPPPPPPPRRRRRRRRRRRAAAAAIIIIIIIILLLLLLLLMMMMMMMMDDDDDDDDLLLLLLLLEEEEEEEEEPPPPPPPGGGGTTTTTTTMMMMMMMMDDDDDDDDSSSSSSVVVVVVVRRRRRRRRRRRSSSSSSGGGGPPPPPPPYYYYYYYYYYYYGGGGQQQQQQQQQIIIIIIIIFFFFFFFFFFFRRRRRRRRRRRPPPPPPPDDDDDDDDNNNNNNNNFFFFFFFFFFFVVVVVVVFFFFFFFFFFFGGGGQQQQQQQQQTTTTTTTGGGGAAAAAGGGGNNNNNNNNNNNNNNNNWWWWWWWWWWWWWWAAAAAKKKKKKKKKGGGGHHHHHHHHHHYYYYYYYYYYYYTTTTTTTEEEEEEEEEGGGGAAAAAEEEEEEEEELLLLLLLLIIIIIIIIDDDDDDDDSSSSSSVVVVVVVLLLLLLLLDDDDDDDDVVVVVVVVVVVVVVRRRRRRRRRRRKKKKKKKKKEEEEEEEEEAAAAAEEEEEEEEESSSSSSCCCCCCDDDDDDDDCCCCCCLLLLLLLLQQQQQQQQQGGGGFFFFFFFFFFFQQQQQQQQQVVVVVVVCCCCCCHHHHHHHHHHSSSSSSLLLLLLLLGGGGGGGGGGGGTTTTTTTGGGGSSSSSSGGGGMMMMMMMMGGGGTTTTTTTLLLLLLLLLLLLLLLLIIIIIIIISSSSSSKKKKKKKKKIIIIIIIIRRRRRRRRRRREEEEEEEEEEEEEEEEEEYYYYYYYYYYYYPPPPPPPDDDDDDDDRRRRRRRRRRRMMMMMMMMMMMMMMMMLLLLLLLLTTTTTTTFFFFFFFFFFFSSSSSSVVVVVVVVVVVVVVPPPPPPPSSSSSSPPPPPPPKKKKKKKKKVVVVVVVSSSSSSDDDDDDDDTTTTTTTVVVVVVVVVVVVVVEEEEEEEEEPPPPPPPYYYYYYYYYYYYNNNNNNNNAAAAATTTTTTTLLLLLLLLSSSSSSVVVVVVVHHHHHHHHHHQQQQQQQQQLLLLLLLLVVVVVVVEEEEEEEEENNNNNNNNAAAAADDDDDDDDEEEEEEEEECCCCCCMMMMMMMMVVVVVVVLLLLLLLLDDDDDDDDNNNNNNNNEEEEEEEEEAAAAALLLLLLLLYYYYYYYYYYYYDDDDDDDDIIIIIIIICCCCCCFFFFFFFFFFFRRRRRRRRRRRTTTTTTTLLLLLLLLKKKKKKKKKLLLLLLLLTTTTTTTTTTTTTTPPPPPPPTTTTTTTFFFFFFFFFFFGGGGDDDDDDDDLLLLLLLLNNNNNNNNHHHHHHHHHHLLLLLLLLIIIIIIIISSSSSSAAAAAVVVVVVVMMMMMMMMSSSSSSGGGGIIIIIIIITTTTTTTCCCCCCCCCCCCLLLLLLLLRRRRRRRRRRRFFFFFFFFFFFPPPPPPPGGGGQQQQQQQQQLLLLLLLLNNNNNNNNAAAAADDDDDDDDLLLLLLLLRRRRRRRRRRRKKKKKKKKKLLLLLLLLAAAAAVVVVVVVNNNNNNNNLLLLLLLLIIIIIIIIPPPPPPPFFFFFFFFFFFPPPPPPPRRRRRRRRRRRLLLLLLLLHHHHHHHHHHFFFFFFFFFFFFFFFFFFFFFFMMMMMMMMVVVVVVVGGGGFFFFFFFFFFFTTTTTTTPPPPPPPLLLLLLLLTTTTTTTSSSSSSRRRRRRRRRRRGGGGSSSSSSQQQQQQQQQQQQQQQQQQYYYYYYYYYYYYRRRRRRRRRRRAAAAALLLLLLLLTTTTTTTVVVVVVVPPPPPPPEEEEEEEEELLLLLLLLTTTTTTTQQQQQQQQQQQQQQQQQQMMMMMMMMWWWWWWWWWWWWWWDDDDDDDDAAAAAKKKKKKKKKNNNNNNNNMMMMMMMMMMMMMMMMCCCCCCAAAAAAAAAADDDDDDDDPPPPPPPRRRRRRRRRRRHHHHHHHHHHGGGGRRRRRRRRRRRYYYYYYYYYYYYLLLLLLLLTTTTTTTAAAAASSSSSSAAAAALLLLLLLLFFFFFFFFFFFRRRRRRRRRRRGGGGRRRRRRRRRRRMMMMMMMMSSSSSSTTTTTTTKKKKKKKKKEEEEEEEEEVVVVVVVDDDDDDDDEEEEEEEEEQQQQQQQQQMMMMMMMMLLLLLLLLNNNNNNNNVVVVVVVQQQQQQQQQNNNNNNNNKKKKKKKKKNNNNNNNNSSSSSSSSSSSSYYYYYYYYYYYYFFFFFFFFFFFVVVVVVVEEEEEEEEEWWWWWWWWWWWWWWIIIIIIIIPPPPPPPNNNNNNNNNNNNNNNNVVVVVVVKKKKKKKKKSSSSSSSSSSSSVVVVVVVCCCCCCDDDDDDDDIIIIIIIIPPPPPPPPPPPPPPKKKKKKKKKGGGGLLLLLLLLKKKKKKKKKMMMMMMMMSSSSSSAAAAATTTTTTTFFFFFFFFFFFIIIIIIIIGGGGNNNNNNNNSSSSSSTTTTTTTAAAAAIIIIIIIIQQQQQQQQQEEEEEEEEEMMMMMMMMFFFFFFFFFFFKKKKKKKKKRRRRRRRRRRRVVVVVVVSSSSSSEEEEEEEEEQQQQQQQQQFFFFFFFFFFFTTTTTTTAAAAAMMMMMMMMFFFFFFFFFFFRRRRRRRRRRRRRRRRRRRRRRKKKKKKKKKAAAAAFFFFFFFFFFFLLLLLLLLHHHHHHHHHHWWWWWWWWWWWWWWYYYYYYYYYYYYTTTTTTTGGGGEEEEEEEEEGGGGMMMMMMMMDDDDDDDDEEEEEEEEEMMMMMMMMEEEEEEEEEFFFFFFFFFFFTTTTTTTEEEEEEEEEAAAAAEEEEEEEEESSSSSSNNNNNNNNMMMMMMMMNNNNNNNNDDDDDDDDLLLLLLLLVVVVVVVSSSSSSEEEEEEEEEYYYYYYYYYYYYQQQQQQQQQQQQQQQQQQYYYYYYYYYYYYQQQQQQQQQDDDDDDDDAAAAASSSSSSAAAAAEEEEEEEEEEEEEEEEEEEEEEEEEEEGGGGEEEEEEEEEFFFFFFFFFFFEEEEEEEEEGGGGEEEEEEEEEEEEEEEEEEEEEEEEEEEEEEEEEEEEAAAAAA

SEQ ID NO: 212 - protein, 3542 aa, Cicer arietinum
MMMMMMMMRRRRRRRRRRREEEEEEEEEIIIIIIIILLLLLLLLHHHHHHHHHHVVVVVVVQQQQQQQQQGGGGGGGGQQQQQQQQQCCCCCCGGGGNNNNNNNNQQQQQQQQQIIIIIIIIGGGGSSSSSSKKKKKKKKKFFFFFFFFFFFWWWWWWWWWWWWWWEEEEEEEEEVVVVVVVIIIIIIIICCCCCCDDDDDDDDEEEEEEEEEHHHHHHHHHHGGGGIIIIIIIIDDDDDDDDQQQQQQQQQTTTTTTTGGGGKKKKKKKKKYYYYYYYYYYYYIIIIIIIISSSSSSEEEEEEEEEGGGGGGGGSSSSSSDDDDDDDDTTTTTTTQQQQQQQQQLLLLLLLLEEEEEEEEERRRRRRRRRRRIIIIIIIINNNNNNNNVVVVVVVYYYYYYYYYYYYYYYYYYYYYYYYNNNNNNNNEEEEEEEEEAAAAASSSSSSGGGGGGGGRRRRRRRRRRRYYYYYYYYYYYYVVVVVVVPPPPPPPRRRRRRRRRRRAAAAAVVVVVVVLLLLLLLLMMMMMMMMDDDDDDDDLLLLLLLLEEEEEEEEEPPPPPPPGGGGTTTTTTTMMMMMMMMEEEEEEEEESSSSSSIIIIIIIIRRRRRRRRRRRSSSSSSGGGGPPPPPPPFFFFFFFFFFFGGGGKKKKKKKKKIIIIIIIIFFFFFFFFFFFRRRRRRRRRRRPPPPPPPDDDDDDDDNNNNNNNNFFFFFFFFFFFVVVVVVVFFFFFFFFFFFGGGGQQQQQQQQQSSSSSSGGGGAAAAAGGGGNNNNNNNNNNNNNNNNWWWWWWWWWWWWWWAAAAAKKKKKKKKKGGGGHHHHHHHHHHYYYYYYYYYYYYTTTTTTTEEEEEEEEEGGGGAAAAAEEEEEEEEELLLLLLLLIIIIIIIIDDDDDDDDSSSSSSVVVVVVVLLLLLLLLDDDDDDDDVVVVVVVVVVVVVVRRRRRRRRRRRKKKKKKKKKEEEEEEEEEAAAAAEEEEEEEEENNNNNNNNCCCCCCDDDDDDDDCCCCCCLLLLLLLLQQQQQQQQQGGGGFFFFFFFFFFFQQQQQQQQQVVVVVVVCCCCCCHHHHHHHHHHSSSSSSLLLLLLLLGGGGGGGGGGGGTTTTTTTGGGGSSSSSSGGGGMMMMMMMMGGGGTTTTTTTLLLLLLLLLLLLLLLLIIIIIIIISSSSSSKKKKKKKKKIIIIIIIIRRRRRRRRRRREEEEEEEEEEEEEEEEEEYYYYYYYYYYYYPPPPPPPDDDDDDDDRRRRRRRRRRRMMMMMMMMMMMMMMMMLLLLLLLLTTTTTTTFFFFFFFFFFFSSSSSSVVVVVVVFFFFFFFFFFFPPPPPPPSSSSSSPPPPPPPKKKKKKKKKVVVVVVVSSSSSSDDDDDDDDTTTTTTTVVVVVVVVVVVVVVEEEEEEEEEPPPPPPPYYYYYYYYYYYYNNNNNNNNAAAAATTTTTTTLLLLLLLLSSSSSSVVVVVVVHHHHHHHHHHQQQQQQQQQLLLLLLLLVVVVVVVEEEEEEEEENNNNNNNNAAAAADDDDDDDDEEEEEEEEECCCCCCMMMMMMMMVVVVVVVLLLLLLLLDDDDDDDDNNNNNNNNEEEEEEEEEAAAAALLLLLLLLYYYYYYYYYYYYDDDDDDDDIIIIIIIICCCCCCFFFFFFFFFFFRRRRRRRRRRRTTTTTTTLLLLLLLLKKKKKKKKKLLLLLLLLSSSSSSTTTTTTTPPPPPPPSSSSSSFFFFFFFFFFFGGGGDDDDDDDDLLLLLLLLNNNNNNNNHHHHHHHHHHLLLLLLLLIIIIIIIISSSSSSAAAAATTTTTTTMMMMMMMMSSSSSSGGGGVVVVVVVTTTTTTTCCCCCCCCCCCCLLLLLLLLRRRRRRRRRRRFFFFFFFFFFFPPPPPPPGGGGQQQQQQQQQLLLLLLLLNNNNNNNNSSSSSSDDDDDDDDLLLLLLLLRRRRRRRRRRRKKKKKKKKKLLLLLLLLAAAAAVVVVVVVNNNNNNNNLLLLLLLLIIIIIIIIPPPPPPPFFFFFFFFFFFPPPPPPPRRRRRRRRRRRLLLLLLLLHHHHHHHHHHFFFFFFFFFFFFFFFFFFFFFFMMMMMMMMVVVVVVVGGGGFFFFFFFFFFFAAAAAPPPPPPPLLLLLLLLTTTTTTTSSSSSSRRRRRRRRRRRGGGGSSSSSSQQQQQQQQQQQQQQQQQQYYYYYYYYYYYYVVVVVVVSSSSSSLLLLLLLLTTTTTTTVVVVVVVPPPPPPPEEEEEEEEELLLLLLLLTTTTTTTQQQQQQQQQQQQQQQQQQMMMMMMMMWWWWWWWWWWWWWWDDDDDDDDAAAAAKKKKKKKKKNNNNNNNNMMMMMMMMMMMMMMMMCCCCCCAAAAAAAAAADDDDDDDDPPPPPPPRRRRRRRRRRRHHHHHHHHHHGGGGRRRRRRRRRRRYYYYYYYYYYYYLLLLLLLLTTTTTTTAAAAASSSSSSAAAAAMMMMMMMMFFFFFFFFFFFRRRRRRRRRRRGGGGKKKKKKKKKMMMMMMMMSSSSSSTTTTTTTKKKKKKKKKEEEEEEEEEVVVVVVVDDDDDDDDEEEEEEEEEQQQQQQQQQIIIIIIIIIIIIIIIINNNNNNNNVVVVVVVQQQQQQQQQNNNNNNNNKKKKKKKKKNNNNNNNNSSSSSSSSSSSSYYYYYYYYYYYYFFFFFFFFFFFVVVVVVVEEEEEEEEEWWWWWWWWWWWWWWIIIIIIIIPPPPPPPNNNNNNNNNNNNNNNNVVVVVVVKKKKKKKKKSSSSSSSSSSSSVVVVVVVCCCCCCDDDDDDDDIIIIIIIIPPPPPPPPPPPPPPKKKKKKKKKNNNNNNNNLLLLLLLLKKKKKKKKKMMMMMMMMSSSSSSSSSSSSTTTTTTTFFFFFFFFFFFIIIIIIIIGGGGNNNNNNNNSSSSSSTTTTTTTSSSSSSIIIIIIIIQQQQQQQQQEEEEEEEEEMMMMMMMMFFFFFFFFFFFRRRRRRRRRRRRRRRRRRRRRRVVVVVVVSSSSSSEEEEEEEEEQQQQQQQQQFFFFFFFFFFFTTTTTTTAAAAAMMMMMMMMFFFFFFFFFFFRRRRRRRRRRRRRRRRRRRRRRKKKKKKKKKAAAAAFFFFFFFFFFFLLLLLLLLHHHHHHHHHHWWWWWWWWWWWWWWYYYYYYYYYYYYTTTTTTTGGGGEEEEEEEEEGGGGMMMMMMMMDDDDDDDDEEEEEEEEEMMMMMMMMEEEEEEEEEFFFFFFFFFFFTTTTTTTEEEEEEEEEAAAAAEEEEEEEEESSSSSSNNNNNNNNMMMMMMMMNNNNNNNNDDDDDDDDLLLLLLLLVVVVVVVAAAAAEEEEEEEEEYYYYYYYYYYYYQQQQQQQQQQQQQQQQQQYYYYYYYYYYYYQQQQQQQQQDDDDDDDDAAAAAIIIIIIIIAAAAAEEEEEEEEEEEEEEEEEEEEEEEEEEEDDDDDDDDEEEEEEEEEYYYYYYYYYYYYEEEEEEEEEEEEEEEEEEEEEEEEEEEGGGGEEEEEEEEEEEEEEEEEEQQQQQQQQQYYYYYYYYYYYYDDDDDDDDEEEEEEEEEQQQQQQQQQQ

SEQ ID NO: 213 - protein, 3605 aa, Dictyostelium discoideum
MMMMMMMMRRRRRRRRRRREEEEEEEEEIIIIIIIIVVVVVVVQQQQQQQQQIIIIIIIIQQQQQQQQQAAAAAGGGGQQQQQQQQQCCCCCCGGGGNNNNNNNNQQQQQQQQQIIIIIIIIGGGGSSSSSSNNNNNNNNFFFFFFFFFFFWWWWWWWWWWWWWWEEEEEEEEEVVVVVVVIIIIIIIISSSSSSEEEEEEEEEEEEEEEEEEHHHHHHHHHHGGGGIIIIIIIIQQQQQQQQQSSSSSSDDDDDDDDGGGGFFFFFFFFFFFHHHHHHHHHHAAAAAGGGGGGGGEEEEEEEEEDDDDDDDDEEEEEEEEEHHHHHHHHHHLLLLLLLLKKKKKKKKKRRRRRRRRRRRLLLLLLLLQQQQQQQQQLLLLLLLLEEEEEEEEERRRRRRRRRRRIIIIIIIINNNNNNNNVVVVVVVYYYYYYYYYYYYYYYYYYYYYYYYNNNNNNNNEEEEEEEEEAAAAARRRRRRRRRRRDDDDDDDDGGGGKKKKKKKKKYYYYYYYYYYYYVVVVVVVPPPPPPPRRRRRRRRRRRSSSSSSVVVVVVVLLLLLLLLVVVVVVVDDDDDDDDLLLLLLLLEEEEEEEEEPPPPPPPGGGGTTTTTTTVVVVVVVDDDDDDDDTTTTTTTIIIIIIIIKKKKKKKKKAAAAASSSSSSPPPPPPPYYYYYYYYYYYYGGGGKKKKKKKKKLLLLLLLLFFFFFFFFFFFRRRRRRRRRRRPPPPPPPDDDDDDDDNNNNNNNNFFFFFFFFFFFIIIIIIIIHHHHHHHHHHGGGGQQQQQQQQQSSSSSSGGGGAAAAAGGGGNNNNNNNNNNNNNNNNWWWWWWWWWWWWWWAAAAAKKKKKKKKKGGGGHHHHHHHHHHYYYYYYYYYYYYTTTTTTTEEEEEEEEEGGGGVVVVVVVEEEEEEEEELLLLLLLLVVVVVVVEEEEEEEEESSSSSSVVVVVVVLLLLLLLLDDDDDDDDVVVVVVVVVVVVVVRRRRRRRRRRRRRRRRRRRRRREEEEEEEEETTTTTTTEEEEEEEEEGGGGCCCCCCDDDDDDDDCCCCCCLLLLLLLLQQQQQQQQQGGGGFFFFFFFFFFFQQQQQQQQQVVVVVVVTTTTTTTHHHHHHHHHHSSSSSSIIIIIIIIGGGGGGGGGGGGTTTTTTTGGGGSSSSSSGGGGLLLLLLLLGGGGTTTTTTTLLLLLLLLLLLLLLLLIIIIIIIISSSSSSKKKKKKKKKIIIIIIIIRRRRRRRRRRREEEEEEEEEEEEEEEEEEFFFFFFFFFFFPPPPPPPDDDDDDDDRRRRRRRRRRRMMMMMMMMMMMMMMMMCCCCCCTTTTTTTFFFFFFFFFFFSSSSSSVVVVVVVGGGGPPPPPPPSSSSSSPPPPPPPKKKKKKKKKVVVVVVVSSSSSSLLLLLLLLTTTTTTTVVVVVVVVVVVVVVEEEEEEEEEPPPPPPPYYYYYYYYYYYYNNNNNNNNAAAAATTTTTTTLLLLLLLLSSSSSSVVVVVVVHHHHHHHHHHQQQQQQQQQLLLLLLLLVVVVVVVEEEEEEEEENNNNNNNNAAAAADDDDDDDDEEEEEEEEEVVVVVVVMMMMMMMMCCCCCCIIIIIIIIDDDDDDDDNNNNNNNNEEEEEEEEEAAAAALLLLLLLLHHHHHHHHHHDDDDDDDDIIIIIIIICCCCCCFFFFFFFFFFFRRRRRRRRRRRTTTTTTTLLLLLLLLKKKKKKKKKLLLLLLLLTTTTTTTQQQQQQQQQPPPPPPPNNNNNNNNYYYYYYYYYYYYGGGGDDDDDDDDLLLLLLLLNNNNNNNNHHHHHHHHHHLLLLLLLLIIIIIIIISSSSSSSSSSSSVVVVVVVMMMMMMMMSSSSSSGGGGIIIIIIIITTTTTTTCCCCCCCCCCCCLLLLLLLLRRRRRRRRRRRFFFFFFFFFFFPPPPPPPGGGGQQQQQQQQQLLLLLLLLNNNNNNNNSSSSSSDDDDDDDDLLLLLLLLRRRRRRRRRRRKKKKKKKKKLLLLLLLLAAAAAVVVVVVVNNNNNNNNLLLLLLLLIIIIIIIIPPPPPPPFFFFFFFFFFFPPPPPPPRRRRRRRRRRRLLLLLLLLHHHHHHHHHHFFFFFFFFFFFFFFFFFFFFFFLLLLLLLLVVVVVVVGGGGFFFFFFFFFFFAAAAAPPPPPPPLLLLLLLLTTTTTTTAAAAAKKKKKKKKKGGGGAAAAASSSSSSSSSSSSYYYYYYYYYYYYNNNNNNNNRRRRRRRRRRRIIIIIIIITTTTTTTVVVVVVVPPPPPPPEEEEEEEEELLLLLLLLTTTTTTTQQQQQQQQQQQQQQQQQQMMMMMMMMFFFFFFFFFFFDDDDDDDDAAAAAKKKKKKKKKNNNNNNNNMMMMMMMMMMMMMMMMAAAAAAAAAASSSSSSDDDDDDDDPPPPPPPHHHHHHHHHHNNNNNNNNGGGGKKKKKKKKKYYYYYYYYYYYYLLLLLLLLTTTTTTTAAAAASSSSSSAAAAALLLLLLLLFFFFFFFFFFFRRRRRRRRRRRGGGGKKKKKKKKKIIIIIIIIFFFFFFFFFFFTTTTTTTKKKKKKKKKEEEEEEEEEVVVVVVVDDDDDDDDEEEEEEEEEQQQQQQQQQMMMMMMMMHHHHHHHHHHNNNNNNNNIIIIIIIIQQQQQQQQQTTTTTTTKKKKKKKKKNNNNNNNNSSSSSSSSSSSSYYYYYYYYYYYYFFFFFFFFFFFVVVVVVVEEEEEEEEEWWWWWWWWWWWWWWIIIIIIIIPPPPPPPHHHHHHHHHHNNNNNNNNIIIIIIIIKKKKKKKKKSSSSSSSSSSSSIIIIIIIICCCCCCDDDDDDDDIIIIIIIIPPPPPPPPPPPPPPKKKKKKKKKGGGGTTTTTTTPPPPPPPMMMMMMMMAAAAAVVVVVVVTTTTTTTFFFFFFFFFFFIIIIIIIIGGGGNNNNNNNNNNNNNNNNTTTTTTTAAAAAIIIIIIIIQQQQQQQQQDDDDDDDDLLLLLLLLFFFFFFFFFFFKKKKKKKKKRRRRRRRRRRRIIIIIIIISSSSSSIIIIIIIIHHHHHHHHHHFFFFFFFFFFFQQQQQQQQQAAAAAMMMMMMMMFFFFFFFFFFFRRRRRRRRRRRRRRRRRRRRRRKKKKKKKKKAAAAAFFFFFFFFFFFLLLLLLLLHHHHHHHHHHWWWWWWWWWWWWWWYYYYYYYYYYYYTTTTTTTLLLLLLLLEEEEEEEEEGGGGMMMMMMMMEEEEEEEEEEEEEEEEEELLLLLLLLEEEEEEEEEFFFFFFFFFFFTTTTTTTEEEEEEEEEAAAAAEEEEEEEEESSSSSSNNNNNNNNMMMMMMMMNNNNNNNNDDDDDDDDLLLLLLLLVVVVVVVYYYYYYYYYYYYEEEEEEEEEYYYYYYYYYYYYQQQQQQQQQQQQQQQQQQYYYYYYYYYYYYSSSSSSNNNNNNNNQQQQQQQQQEEEEEEEEETTTTTTTEEEEEEEEEEEEEEEEEEDDDDDDDDGGGGGGGGEEEEEEEEEYYYYYYYYYYYYQQQQQQQQQEEEEEEEEEEEEEEEEEEHHHHHHHHHHEEEEEEEEEEEEEEEEEEHHHHHHHHHHEEEEEEEEEEEEEEEEEEQQQQQQQQQAAAAAEEEEEEEEENNNNNNNNN

SEQ ID NO: 214 - protein, 3503 aa, Eimeria tenella
MMMMMMMMRRRRRRRRRRREEEEEEEEEIIIIIIIIVVVVVVVHHHHHHHHHHVVVVVVVQQQQQQQQQGGGGGGGGQQQQQQQQQCCCCCCGGGGNNNNNNNNQQQQQQQQQIIIIIIIIGGGGAAAAAKKKKKKKKKFFFFFFFFFFFWWWWWWWWWWWWWWEEEEEEEEEVVVVVVVIIIIIIIISSSSSSDDDDDDDDEEEEEEEEEHHHHHHHHHHGGGGIIIIIIIIAAAAAPPPPPPPTTTTTTTGGGGTTTTTTTYYYYYYYYYYYYKKKKKKKKKGGGGDDDDDDDDSSSSSSDDDDDDDDLLLLLLLLQQQQQQQQQLLLLLLLLEEEEEEEEERRRRRRRRRRRIIIIIIIISSSSSSVVVVVVVFFFFFFFFFFFYYYYYYYYYYYYNNNNNNNNEEEEEEEEEAAAAATTTTTTTGGGGGGGGRRRRRRRRRRRYYYYYYYYYYYYVVVVVVVPPPPPPPRRRRRRRRRRRAAAAAVVVVVVVLLLLLLLLMMMMMMMMDDDDDDDDLLLLLLLLEEEEEEEEEPPPPPPPGGGGTTTTTTTMMMMMMMMDDDDDDDDSSSSSSVVVVVVVRRRRRRRRRRRSSSSSSGGGGPPPPPPPFFFFFFFFFFFGGGGQQQQQQQQQLLLLLLLLFFFFFFFFFFFRRRRRRRRRRRPPPPPPPDDDDDDDDNNNNNNNNFFFFFFFFFFFVVVVVVVFFFFFFFFFFFGGGGQQQQQQQQQTTTTTTTGGGGAAAAAGGGGNNNNNNNNNNNNNNNNWWWWWWWWWWWWWWAAAAAKKKKKKKKKGGGGHHHHHHHHHHYYYYYYYYYYYYTTTTTTTEEEEEEEEEGGGGAAAAAEEEEEEEEELLLLLLLLIIIIIIIIDDDDDDDDSSSSSSVVVVVVVLLLLLLLLDDDDDDDDVVVVVVVVVVVVVVRRRRRRRRRRRKKKKKKKKKEEEEEEEEEAAAAAEEEEEEEEEGGGGCCCCCCDDDDDDDDCCCCCCLLLLLLLLQQQQQQQQQGGGGFFFFFFFFFFFQQQQQQQQQVVVVVVVTTTTTTTHHHHHHHHHHSSSSSSLLLLLLLLGGGGGGGGGGGGTTTTTTTGGGGSSSSSSGGGGMMMMMMMMGGGGTTTTTTTLLLLLLLLLLLLLLLLIIIIIIIISSSSSSKKKKKKKKKVVVVVVVRRRRRRRRRRREEEEEEEEEEEEEEEEEEYYYYYYYYYYYYPPPPPPPDDDDDDDDRRRRRRRRRRRIIIIIIIIMMMMMMMMEEEEEEEEETTTTTTTFFFFFFFFFFFSSSSSSVVVVVVVFFFFFFFFFFFPPPPPPPSSSSSSPPPPPPPKKKKKKKKKVVVVVVVSSSSSSDDDDDDDDTTTTTTTVVVVVVVVVVVVVVEEEEEEEEEPPPPPPPYYYYYYYYYYYYNNNNNNNNAAAAATTTTTTTLLLLLLLLSSSSSSVVVVVVVHHHHHHHHHHQQQQQQQQQLLLLLLLLVVVVVVVEEEEEEEEENNNNNNNNAAAAADDDDDDDDEEEEEEEEEVVVVVVVQQQQQQQQQVVVVVVVIIIIIIIIDDDDDDDDNNNNNNNNEEEEEEEEEAAAAALLLLLLLLYYYYYYYYYYYYDDDDDDDDIIIIIIIICCCCCCFFFFFFFFFFFRRRRRRRRRRRTTTTTTTLLLLLLLLKKKKKKKKKLLLLLLLLTTTTTTTTTTTTTTPPPPPPPTTTTTTTYYYYYYYYYYYYGGGGDDDDDDDDLLLLLLLLNNNNNNNNHHHHHHHHHHLLLLLLLLVVVVVVVSSSSSSAAAAAAAAAAMMMMMMMMSSSSSSGGGGVVVVVVVTTTTTTTCCCCCCSSSSSSLLLLLLLLRRRRRRRRRRRFFFFFFFFFFFPPPPPPPGGGGQQQQQQQQQLLLLLLLLNNNNNNNNSSSSSSDDDDDDDDLLLLLLLLRRRRRRRRRRRKKKKKKKKKLLLLLLLLAAAAAVVVVVVVNNNNNNNNLLLLLLLLVVVVVVVPPPPPPPFFFFFFFFFFFPPPPPPPRRRRRRRRRRRLLLLLLLLHHHHHHHHHHFFFFFFFFFFFFFFFFFFFFFFLLLLLLLLIIIIIIIIGGGGFFFFFFFFFFFAAAAAPPPPPPPLLLLLLLLTTTTTTTSSSSSSRRRRRRRRRRRGGGGSSSSSSQQQQQQQQQQQQQQQQQQYYYYYYYYYYYYRRRRRRRRRRRAAAAALLLLLLLLTTTTTTTVVVVVVVPPPPPPPEEEEEEEEELLLLLLLLTTTTTTTQQQQQQQQQQQQQQQQQQMMMMMMMMFFFFFFFFFFFDDDDDDDDAAAAAKKKKKKKKKNNNNNNNNMMMMMMMMMMMMMMMMCCCCCCAAAAASSSSSSDDDDDDDDPPPPPPPRRRRRRRRRRRHHHHHHHHHHGGGGRRRRRRRRRRRYYYYYYYYYYYYLLLLLLLLTTTTTTTAAAAACCCCCCAAAAALLLLLLLLFFFFFFFFFFFRRRRRRRRRRRGGGGRRRRRRRRRRRMMMMMMMMSSSSSSTTTTTTTKKKKKKKKKEEEEEEEEEVVVVVVVDDDDDDDDEEEEEEEEEQQQQQQQQQMMMMMMMMLLLLLLLLNNNNNNNNVVVVVVVQQQQQQQQQNNNNNNNNKKKKKKKKKNNNNNNNNSSSSSSSSSSSSYYYYYYYYYYYYFFFFFFFFFFFVVVVVVVEEEEEEEEEWWWWWWWWWWWWWWIIIIIIIIPPPPPPPNNNNNNNNNNNNNNNNMMMMMMMMKKKKKKKKKSSSSSSGGGGVVVVVVVCCCCCCDDDDDDDDIIIIIIIIPPPPPPPPPPPPPPKKKKKKKKKGGGGLLLLLLLLKKKKKKKKKMMMMMMMMSSSSSSVVVVVVVTTTTTTTFFFFFFFFFFFVVVVVVVGGGGNNNNNNNNSSSSSSTTTTTTTAAAAAIIIIIIIIQQQQQQQQQEEEEEEEEEMMMMMMMMFFFFFFFFFFFKKKKKKKKKRRRRRRRRRRRVVVVVVVSSSSSSDDDDDDDDQQQQQQQQQFFFFFFFFFFFTTTTTTTAAAAAMMMMMMMMFFFFFFFFFFFRRRRRRRRRRRRRRRRRRRRRRKKKKKKKKKAAAAAFFFFFFFFFFFLLLLLLLLHHHHHHHHHHWWWWWWWWWWWWWWYYYYYYYYYYYYTTTTTTTGGGGEEEEEEEEEGGGGMMMMMMMMDDDDDDDDEEEEEEEEEMMMMMMMMEEEEEEEEEFFFFFFFFFFFTTTTTTTEEEEEEEEEAAAAAEEEEEEEEESSSSSSNNNNNNNNMMMMMMMMNNNNNNNNDDDDDDDDLLLLLLLLVVVVVVVSSSSSSEEEEEEEEEYYYYYYYYYYYYQQQQQQQQQQQQQQQQQQYYYYYYYYYYYYQQQQQQQQQDDDDDDDDAAAAATTTTTTTAAAAAEEEEEEEEEEEEEEEEEEEEEEEEEEEGGGGEEEEEEEEEFFFFFFFFFFFDDDDDDDDEEEEEEEEEEEEEEEEEEEEEEEEEEEGGGGVVVVVVVMMMMMMMMDDDDDDDDAAAAAEEEEEEEEEGGGGAAAAAAAAAAA

SEQ ID NO: 215 - protein, 3507 aa, Epichloe typhina
MMMMMMMMRRRRRRRRRRREEEEEEEEEIIIIIIIIVVVVVVVHHHHHHHHHHLLLLLLLLQQQQQQQQQTTTTTTTGGGGQQQQQQQQQCCCCCCGGGGNNNNNNNNQQQQQQQQQIIIIIIIIGGGGAAAAAAAAAAFFFFFFFFFFFWWWWWWWWWWWWWWQQQQQQQQQTTTTTTTIIIIIIIISSSSSSGGGGEEEEEEEEEHHHHHHHHHHGGGGLLLLLLLLDDDDDDDDSSSSSSNNNNNNNNGGGGVVVVVVVYYYYYYYYYYYYNNNNNNNNGGGGTTTTTTTSSSSSSEEEEEEEEELLLLLLLLQQQQQQQQQLLLLLLLLEEEEEEEEERRRRRRRRRRRMMMMMMMMSSSSSSVVVVVVVYYYYYYYYYYYYFFFFFFFFFFFNNNNNNNNEEEEEEEEEAAAAASSSSSSGGGGNNNNNNNNKKKKKKKKKYYYYYYYYYYYYVVVVVVVPPPPPPPRRRRRRRRRRRAAAAAVVVVVVVLLLLLLLLVVVVVVVDDDDDDDDLLLLLLLLEEEEEEEEEPPPPPPPGGGGTTTTTTTMMMMMMMMDDDDDDDDAAAAAVVVVVVVRRRRRRRRRRRAAAAAGGGGPPPPPPPFFFFFFFFFFFGGGGQQQQQQQQQLLLLLLLLFFFFFFFFFFFRRRRRRRRRRRPPPPPPPDDDDDDDDNNNNNNNNFFFFFFFFFFFVVVVVVVFFFFFFFFFFFGGGGQQQQQQQQQSSSSSSGGGGAAAAAGGGGNNNNNNNNNNNNNNNNWWWWWWWWWWWWWWAAAAAKKKKKKKKKGGGGHHHHHHHHHHYYYYYYYYYYYYTTTTTTTEEEEEEEEEGGGGAAAAAEEEEEEEEELLLLLLLLVVVVVVVDDDDDDDDQQQQQQQQQVVVVVVVLLLLLLLLDDDDDDDDVVVVVVVVVVVVVVRRRRRRRRRRRRRRRRRRRRRREEEEEEEEEAAAAAEEEEEEEEEGGGGCCCCCCDDDDDDDDCCCCCCLLLLLLLLQQQQQQQQQGGGGFFFFFFFFFFFQQQQQQQQQIIIIIIIITTTTTTTHHHHHHHHHHSSSSSSLLLLLLLLGGGGGGGGGGGGTTTTTTTGGGGAAAAAGGGGMMMMMMMMGGGGTTTTTTTLLLLLLLLLLLLLLLLIIIIIIIISSSSSSKKKKKKKKKIIIIIIIIRRRRRRRRRRREEEEEEEEEEEEEEEEEEFFFFFFFFFFFPPPPPPPDDDDDDDDRRRRRRRRRRRMMMMMMMMMMMMMMMMAAAAATTTTTTTFFFFFFFFFFFSSSSSSVVVVVVVVVVVVVVPPPPPPPSSSSSSPPPPPPPKKKKKKKKKVVVVVVVSSSSSSDDDDDDDDTTTTTTTVVVVVVVVVVVVVVEEEEEEEEEPPPPPPPYYYYYYYYYYYYNNNNNNNNAAAAATTTTTTTLLLLLLLLSSSSSSVVVVVVVHHHHHHHHHHQQQQQQQQQLLLLLLLLVVVVVVVEEEEEEEEENNNNNNNNSSSSSSDDDDDDDDEEEEEEEEETTTTTTTFFFFFFFFFFFCCCCCCIIIIIIIIDDDDDDDDNNNNNNNNEEEEEEEEEAAAAALLLLLLLLYYYYYYYYYYYYDDDDDDDDIIIIIIIICCCCCCMMMMMMMMRRRRRRRRRRRTTTTTTTLLLLLLLLKKKKKKKKKLLLLLLLLSSSSSSNNNNNNNNPPPPPPPSSSSSSYYYYYYYYYYYYGGGGDDDDDDDDLLLLLLLLNNNNNNNNYYYYYYYYYYYYLLLLLLLLVVVVVVVSSSSSSAAAAAVVVVVVVMMMMMMMMSSSSSSGGGGVVVVVVVTTTTTTTTTTTTTTCCCCCCLLLLLLLLRRRRRRRRRRRFFFFFFFFFFFPPPPPPPGGGGQQQQQQQQQLLLLLLLLNNNNNNNNSSSSSSDDDDDDDDLLLLLLLLRRRRRRRRRRRKKKKKKKKKLLLLLLLLAAAAAVVVVVVVNNNNNNNNMMMMMMMMVVVVVVVPPPPPPPFFFFFFFFFFFPPPPPPPRRRRRRRRRRRLLLLLLLLHHHHHHHHHHFFFFFFFFFFFFFFFFFFFFFFMMMMMMMMVVVVVVVGGGGFFFFFFFFFFFAAAAAPPPPPPPLLLLLLLLTTTTTTTSSSSSSRRRRRRRRRRRGGGGAAAAAHHHHHHHHHHSSSSSSFFFFFFFFFFFRRRRRRRRRRRAAAAAVVVVVVVSSSSSSVVVVVVVPPPPPPPEEEEEEEEELLLLLLLLTTTTTTTQQQQQQQQQQQQQQQQQQMMMMMMMMFFFFFFFFFFFDDDDDDDDPPPPPPPKKKKKKKKKNNNNNNNNMMMMMMMMMMMMMMMMAAAAAAAAAASSSSSSDDDDDDDDFFFFFFFFFFFRRRRRRRRRRRNNNNNNNNGGGGRRRRRRRRRRRYYYYYYYYYYYYLLLLLLLLTTTTTTTCCCCCCSSSSSSAAAAAIIIIIIIIFFFFFFFFFFFRRRRRRRRRRRGGGGKKKKKKKKKVVVVVVVAAAAAMMMMMMMMKKKKKKKKKEEEEEEEEEVVVVVVVEEEEEEEEEDDDDDDDDQQQQQQQQQMMMMMMMMRRRRRRRRRRRNNNNNNNNVVVVVVVQQQQQQQQQNNNNNNNNKKKKKKKKKNNNNNNNNSSSSSSSSSSSSYYYYYYYYYYYYFFFFFFFFFFFVVVVVVVEEEEEEEEEWWWWWWWWWWWWWWIIIIIIIIPPPPPPPNNNNNNNNNNNNNNNNIIIIIIIIQQQQQQQQQTTTTTTTAAAAALLLLLLLLCCCCCCAAAAAIIIIIIIIPPPPPPPPPPPPPPRRRRRRRRRRRGGGGLLLLLLLLKKKKKKKKKMMMMMMMMSSSSSSSSSSSSTTTTTTTFFFFFFFFFFFIIIIIIIIGGGGNNNNNNNNSSSSSSTTTTTTTSSSSSSIIIIIIIIQQQQQQQQQEEEEEEEEELLLLLLLLFFFFFFFFFFFKKKKKKKKKRRRRRRRRRRRVVVVVVVGGGGEEEEEEEEEQQQQQQQQQFFFFFFFFFFFTTTTTTTAAAAAMMMMMMMMFFFFFFFFFFFRRRRRRRRRRRRRRRRRRRRRRKKKKKKKKKAAAAAFFFFFFFFFFFLLLLLLLLHHHHHHHHHHWWWWWWWWWWWWWWYYYYYYYYYYYYTTTTTTTGGGGEEEEEEEEEGGGGMMMMMMMMDDDDDDDDEEEEEEEEEMMMMMMMMEEEEEEEEEFFFFFFFFFFFTTTTTTTEEEEEEEEEAAAAAEEEEEEEEESSSSSSNNNNNNNNMMMMMMMMNNNNNNNNDDDDDDDDLLLLLLLLVVVVVVVSSSSSSEEEEEEEEEYYYYYYYYYYYYQQQQQQQQQQQQQQQQQQYYYYYYYYYYYYQQQQQQQQQDDDDDDDDAAAAAGGGGIIIIIIIIDDDDDDDDEEEEEEEEEEEEEEEEEEEEEEEEEEEEEEEEEEEEEEEEEEEEEYYYYYYYYYYYYEEEEEEEEEEEEEEEEEEEEEEEEEEEAAAAAPPPPPPPVVVVVVVDDDDDDDDEEEEEEEEEPPPPPPPLLLLLLLLEEEEEEEEEE

SEQ ID NO: 216 - protein, 3486 aa, Blumeria graminis
MMMMMMMMRRRRRRRRRRREEEEEEEEEIIIIIIIIVVVVVVVHHHHHHHHHHLLLLLLLLQQQQQQQQQTTTTTTTGGGGQQQQQQQQQCCCCCCGGGGNNNNNNNNQQQQQQQQQIIIIIIIIGGGGAAAAAAAAAAFFFFFFFFFFFWWWWWWWWWWWWWWQQQQQQQQQTTTTTTTIIIIIIIISSSSSSGGGGEEEEEEEEEHHHHHHHHHHGGGGLLLLLLLLDDDDDDDDGGGGSSSSSSGGGGVVVVVVVYYYYYYYYYYYYNNNNNNNNGGGGTTTTTTTSSSSSSDDDDDDDDLLLLLLLLQQQQQQQQQLLLLLLLLEEEEEEEEERRRRRRRRRRRMMMMMMMMNNNNNNNNVVVVVVVYYYYYYYYYYYYFFFFFFFFFFFNNNNNNNNEEEEEEEEEAAAAASSSSSSGGGGNNNNNNNNKKKKKKKKKYYYYYYYYYYYYVVVVVVVPPPPPPPRRRRRRRRRRRAAAAAVVVVVVVLLLLLLLLVVVVVVVDDDDDDDDLLLLLLLLEEEEEEEEEPPPPPPPGGGGTTTTTTTMMMMMMMMDDDDDDDDAAAAAVVVVVVVRRRRRRRRRRRAAAAAGGGGPPPPPPPFFFFFFFFFFFGGGGQQQQQQQQQLLLLLLLLFFFFFFFFFFFRRRRRRRRRRRPPPPPPPDDDDDDDDNNNNNNNNFFFFFFFFFFFVVVVVVVFFFFFFFFFFFGGGGQQQQQQQQQSSSSSSGGGGAAAAAGGGGNNNNNNNNNNNNNNNNWWWWWWWWWWWWWWAAAAAKKKKKKKKKGGGGHHHHHHHHHHYYYYYYYYYYYYTTTTTTTEEEEEEEEEGGGGAAAAAEEEEEEEEELLLLLLLLVVVVVVVDDDDDDDDQQQQQQQQQVVVVVVVLLLLLLLLDDDDDDDDVVVVVVVVVVVVVVRRRRRRRRRRRRRRRRRRRRRREEEEEEEEEAAAAAEEEEEEEEEGGGGCCCCCCDDDDDDDDCCCCCCLLLLLLLLQQQQQQQQQGGGGFFFFFFFFFFFQQQQQQQQQIIIIIIIITTTTTTTHHHHHHHHHHSSSSSSLLLLLLLLGGGGGGGGGGGGTTTTTTTGGGGAAAAAGGGGMMMMMMMMGGGGTTTTTTTLLLLLLLLLLLLLLLLIIIIIIIISSSSSSKKKKKKKKKIIIIIIIIRRRRRRRRRRREEEEEEEEEEEEEEEEEEFFFFFFFFFFFPPPPPPPDDDDDDDDRRRRRRRRRRRMMMMMMMMMMMMMMMMAAAAATTTTTTTFFFFFFFFFFFSSSSSSVVVVVVVVVVVVVVPPPPPPPSSSSSSPPPPPPPKKKKKKKKKVVVVVVVSSSSSSDDDDDDDDTTTTTTTVVVVVVVVVVVVVVEEEEEEEEEPPPPPPPYYYYYYYYYYYYNNNNNNNNAAAAATTTTTTTLLLLLLLLSSSSSSVVVVVVVHHHHHHHHHHQQQQQQQQQLLLLLLLLVVVVVVVEEEEEEEEENNNNNNNNSSSSSSDDDDDDDDEEEEEEEEETTTTTTTFFFFFFFFFFFCCCCCCIIIIIIIIDDDDDDDDNNNNNNNNEEEEEEEEEAAAAALLLLLLLLYYYYYYYYYYYYDDDDDDDDIIIIIIIICCCCCCMMMMMMMMRRRRRRRRRRRTTTTTTTLLLLLLLLKKKKKKKKKLLLLLLLLSSSSSSNNNNNNNNPPPPPPPSSSSSSYYYYYYYYYYYYGGGGDDDDDDDDLLLLLLLLNNNNNNNNHHHHHHHHHHLLLLLLLLVVVVVVVSSSSSSAAAAAVVVVVVVMMMMMMMMSSSSSSGGGGVVVVVVVTTTTTTTTTTTTTTCCCCCCLLLLLLLLRRRRRRRRRRRFFFFFFFFFFFPPPPPPPGGGGQQQQQQQQQLLLLLLLLNNNNNNNNSSSSSSDDDDDDDDLLLLLLLLRRRRRRRRRRRKKKKKKKKKLLLLLLLLAAAAAVVVVVVVNNNNNNNNMMMMMMMMVVVVVVVPPPPPPPFFFFFFFFFFFPPPPPPPRRRRRRRRRRRLLLLLLLLHHHHHHHHHHFFFFFFFFFFFFFFFFFFFFFFMMMMMMMMVVVVVVVGGGGFFFFFFFFFFFAAAAAPPPPPPPLLLLLLLLTTTTTTTSSSSSSRRRRRRRRRRRGGGGAAAAAHHHHHHHHHHSSSSSSFFFFFFFFFFFRRRRRRRRRRRAAAAAVVVVVVVTTTTTTTVVVVVVVPPPPPPPEEEEEEEEELLLLLLLLTTTTTTTQQQQQQQQQQQQQQQQQQMMMMMMMMFFFFFFFFFFFDDDDDDDDPPPPPPPKKKKKKKKKNNNNNNNNMMMMMMMMMMMMMMMMAAAAAAAAAASSSSSSDDDDDDDDFFFFFFFFFFFRRRRRRRRRRRNNNNNNNNGGGGRRRRRRRRRRRYYYYYYYYYYYYLLLLLLLLTTTTTTTCCCCCCSSSSSSAAAAAIIIIIIIIFFFFFFFFFFFRRRRRRRRRRRGGGGKKKKKKKKKVVVVVVVSSSSSSMMMMMMMMKKKKKKKKKEEEEEEEEEVVVVVVVEEEEEEEEEDDDDDDDDQQQQQQQQQMMMMMMMMRRRRRRRRRRRNNNNNNNNVVVVVVVQQQQQQQQQQQQQQQQQQKKKKKKKKKNNNNNNNNVVVVVVVSSSSSSYYYYYYYYYYYYFFFFFFFFFFFVVVVVVVEEEEEEEEEWWWWWWWWWWWWWWIIIIIIIIPPPPPPPNNNNNNNNNNNNNNNNVVVVVVVQQQQQQQQQTTTTTTTAAAAALLLLLLLLCCCCCCSSSSSSIIIIIIIIPPPPPPPPPPPPPPRRRRRRRRRRRGGGGLLLLLLLLKKKKKKKKKMMMMMMMMSSSSSSSSSSSSTTTTTTTFFFFFFFFFFFVVVVVVVGGGGNNNNNNNNSSSSSSTTTTTTTSSSSSSIIIIIIIIQQQQQQQQQEEEEEEEEELLLLLLLLFFFFFFFFFFFKKKKKKKKKRRRRRRRRRRRVVVVVVVGGGGDDDDDDDDQQQQQQQQQFFFFFFFFFFFTTTTTTTAAAAAMMMMMMMMFFFFFFFFFFFRRRRRRRRRRRRRRRRRRRRRRKKKKKKKKKAAAAAFFFFFFFFFFFLLLLLLLLHHHHHHHHHHWWWWWWWWWWWWWWYYYYYYYYYYYYTTTTTTTGGGGEEEEEEEEEGGGGMMMMMMMMDDDDDDDDEEEEEEEEEMMMMMMMMEEEEEEEEEFFFFFFFFFFFTTTTTTTEEEEEEEEEAAAAAEEEEEEEEESSSSSSNNNNNNNNMMMMMMMMNNNNNNNNDDDDDDDDLLLLLLLLVVVVVVVSSSSSSEEEEEEEEEYYYYYYYYYYYYQQQQQQQQQQQQQQQQQQYYYYYYYYYYYYQQQQQQQQQEEEEEEEEEAAAAASSSSSSIIIIIIIISSSSSSEEEEEEEEEGGGGEEEEEEEEEEEEEEEEEEEEEEEEEEEYYYYYYYYYYYYPPPPPPPEEEEEEEEEEEEEEEEEEVVVVVVVSSSSSSNNNNNNNNEEEEEEEEEEEEEEEEEEEEEEEEEEEE

SEQ ID NO: 217 - protein, 3462 aa, Euglena gracilis
MMMMMMMMRRRRRRRRRRREEEEEEEEEIIIIIIIIVVVVVVVHHHHHHHHHHIIIIIIIIQQQQQQQQQAAAAAGGGGQQQQQQQQQCCCCCCGGGGNNNNNNNNQQQQQQQQQIIIIIIIIGGGGSSSSSSKKKKKKKKKFFFFFFFFFFFWWWWWWWWWWWWWWEEEEEEEEEVVVVVVVIIIIIIIISSSSSSDDDDDDDDEEEEEEEEEQQQQQQQQQGGGGVVVVVVVDDDDDDDDPPPPPPPPPPPPPPDDDDDDDDIIIIIIIIPPPPPPPGGGGDDDDDDDDSSSSSSDDDDDDDDLLLLLLLLQQQQQQQQQLLLLLLLLEEEEEEEEERRRRRRRRRRRIIIIIIIINNNNNNNNVVVVVVVYYYYYYYYYYYYYYYYYYYYYYYYNNNNNNNNEEEEEEEEEAAAAATTTTTTTGGGGGGGGRRRRRRRRRRRYYYYYYYYYYYYVVVVVVVPPPPPPPAAAAAIIIIIIIILLLLLLLLMMMMMMMMDDDDDDDDLLLLLLLLEEEEEEEEEPPPPPPPGGGGTTTTTTTMMMMMMMMDDDDDDDDSSSSSSVVVVVVVRRRRRRRRRRRAAAAAGGGGPPPPPPPYYYYYYYYYYYYGGGGQQQQQQQQQIIIIIIIIFFFFFFFFFFFRRRRRRRRRRRPPPPPPPDDDDDDDDNNNNNNNNFFFFFFFFFFFVVVVVVVFFFFFFFFFFFGGGGQQQQQQQQQTTTTTTTGGGGAAAAAGGGGNNNNNNNNNNNNNNNNWWWWWWWWWWWWWWAAAAAKKKKKKKKKGGGGHHHHHHHHHHYYYYYYYYYYYYTTTTTTTEEEEEEEEEGGGGPPPPPPPEEEEEEEEELLLLLLLLIIIIIIIIDDDDDDDDSSSSSSVVVVVVVLLLLLLLLDDDDDDDDVVVVVVVVVVVVVVRRRRRRRRRRRKKKKKKKKKEEEEEEEEEAAAAAEEEEEEEEESSSSSSCCCCCCDDDDDDDDCCCCCCLLLLLLLLQQQQQQQQQGGGGFFFFFFFFFFFQQQQQQQQQIIIIIIIIAAAAAHHHHHHHHHHSSSSSSLLLLLLLLGGGGGGGGGGGGTTTTTTTGGGGSSSSSSGGGGMMMMMMMMGGGGTTTTTTTLLLLLLLLLLLLLLLLIIIIIIIISSSSSSKKKKKKKKKIIIIIIIIRRRRRRRRRRREEEEEEEEEEEEEEEEEEYYYYYYYYYYYYPPPPPPPDDDDDDDDRRRRRRRRRRRMMMMMMMMMMMMMMMMMMMMMMMMTTTTTTTFFFFFFFFFFFSSSSSSVVVVVVVIIIIIIIIPPPPPPPSSSSSSPPPPPPPKKKKKKKKKVVVVVVVSSSSSSDDDDDDDDTTTTTTTVVVVVVVVVVVVVVEEEEEEEEEPPPPPPPYYYYYYYYYYYYNNNNNNNNTTTTTTTTTTTTTTLLLLLLLLSSSSSSVVVVVVVHHHHHHHHHHQQQQQQQQQLLLLLLLLVVVVVVVEEEEEEEEENNNNNNNNAAAAADDDDDDDDEEEEEEEEEVVVVVVVMMMMMMMMCCCCCCIIIIIIIIGGGGNNNNNNNNEEEEEEEEEAAAAALLLLLLLLYYYYYYYYYYYYDDDDDDDDIIIIIIIICCCCCCLLLLLLLLPPPPPPPTTTTTTTLLLLLLLLKKKKKKKKKLLLLLLLLTTTTTTTTTTTTTTPPPPPPPTTTTTTTFFFFFFFFFFFGGGGHHHHHHHHHHEEEEEEEEETTTTTTTLLLLLLLLVVVVVVVSSSSSSAAAAAVVVVVVVMMMMMMMMSSSSSSGGGGVVVVVVVTTTTTTTCCCCCCCCCCCCLLLLLLLLRRRRRRRRRRRFFFFFFFFFFFPPPPPPPGGGGQQQQQQQQQLLLLLLLLNNNNNNNNSSSSSSDDDDDDDDLLLLLLLLRRRRRRRRRRRKKKKKKKKKLLLLLLLLAAAAAVVVVVVVNNNNNNNNLLLLLLLLIIIIIIIIPPPPPPPFFFFFFFFFFFPPPPPPPRRRRRRRRRRRLLLLLLLLHHHHHHHHHHFFFFFFFFFFFFFFFFFFFFFFLLLLLLLLVVVVVVVGGGGFFFFFFFFFFFAAAAAPPPPPPPLLLLLLLLTTTTTTTSSSSSSRRRRRRRRRRRGGGGSSSSSSQQQQQQQQQQQQQQQQQQYYYYYYYYYYYYRRRRRRRRRRRAAAAALLLLLLLLTTTTTTTVVVVVVVPPPPPPPEEEEEEEEELLLLLLLLTTTTTTTQQQQQQQQQQQQQQQQQQMMMMMMMMFFFFFFFFFFFDDDDDDDDAAAAAKKKKKKKKKNNNNNNNNMMMMMMMMMMMMMMMMAAAAAAAAAASSSSSSDDDDDDDDPPPPPPPAAAAAHHHHHHHHHHGGGGRRRRRRRRRRRYYYYYYYYYYYYLLLLLLLLTTTTTTTAAAAASSSSSSAAAAAMMMMMMMMFFFFFFFFFFFRRRRRRRRRRRGGGGRRRRRRRRRRRMMMMMMMMSSSSSSTTTTTTTKKKKKKKKKEEEEEEEEEVVVVVVVDDDDDDDDEEEEEEEEEQQQQQQQQQMMMMMMMMLLLLLLLLNNNNNNNNVVVVVVVQQQQQQQQQNNNNNNNNKKKKKKKKKNNNNNNNNSSSSSSSSSSSSYYYYYYYYYYYYFFFFFFFFFFFVVVVVVVEEEEEEEEEWWWWWWWWWWWWWWIIIIIIIIPPPPPPPNNNNNNNNNNNNNNNNIIIIIIIIKKKKKKKKKSSSSSSSSSSSSVVVVVVVCCCCCCDDDDDDDDIIIIIIIIPPPPPPPPPPPPPPKKKKKKKKKGGGGLLLLLLLLKKKKKKKKKMMMMMMMMSSSSSSAAAAATTTTTTTFFFFFFFFFFFIIIIIIIIGGGGNNNNNNNNNNNNNNNNTTTTTTTAAAAAIIIIIIIIQQQQQQQQQEEEEEEEEEMMMMMMMMFFFFFFFFFFFKKKKKKKKKRRRRRRRRRRRVVVVVVVSSSSSSEEEEEEEEEQQQQQQQQQFFFFFFFFFFFTTTTTTTAAAAAMMMMMMMMFFFFFFFFFFFRRRRRRRRRRRRRRRRRRRRRRKKKKKKKKKAAAAAFFFFFFFFFFFLLLLLLLLHHHHHHHHHHWWWWWWWWWWWWWWYYYYYYYYYYYYTTTTTTTGGGGEEEEEEEEEGGGGMMMMMMMMDDDDDDDDEEEEEEEEEMMMMMMMMEEEEEEEEEFFFFFFFFFFFTTTTTTTEEEEEEEEEAAAAAEEEEEEEEESSSSSSNNNNNNNNMMMMMMMMNNNNNNNNDDDDDDDDLLLLLLLLVVVVVVVSSSSSSEEEEEEEEEYYYYYYYYYYYYQQQQQQQQQQQQQQQQQQYYYYYYYYYYYYQQQQQQQQQDDDDDDDDAAAAATTTTTTTVVVVVVVEEEEEEEEEEEEEEEEEEEEEEEEEEEGGGGEEEEEEEEEFFFFFFFFFFFDDDDDDDDEEEEEEEEEEEEEEEEEEEEEEEEEEEDDDDDDDDVVVVVVVEEEEEEEEEQQQQQQQQQYYYYYYYYYYYYY

SEQ ID NO: 218 - protein, 3500 aa, Monoeuplotes crassus
MMMMMMMMRRRRRRRRRRREEEEEEEEEIIIIIIIIVVVVVVVHHHHHHHHHHVVVVVVVQQQQQQQQQGGGGGGGGQQQQQQQQQCCCCCCGGGGNNNNNNNNQQQQQQQQQIIIIIIIIGGGGAAAAAKKKKKKKKKFFFFFFFFFFFWWWWWWWWWWWWWWEEEEEEEEEVVVVVVVIIIIIIIISSSSSSDDDDDDDDEEEEEEEEEHHHHHHHHHHGGGGVVVVVVVDDDDDDDDPPPPPPPTTTTTTTGGGGTTTTTTTYYYYYYYYYYYYHHHHHHHHHHGGGGDDDDDDDDSSSSSSDDDDDDDDLLLLLLLLQQQQQQQQQLLLLLLLLEEEEEEEEERRRRRRRRRRRIIIIIIIINNNNNNNNVVVVVVVYYYYYYYYYYYYYYYYYYYYYYYYNNNNNNNNEEEEEEEEEAAAAATTTTTTTGGGGGGGGRRRRRRRRRRRYYYYYYYYYYYYVVVVVVVPPPPPPPRRRRRRRRRRRAAAAAVVVVVVVLLLLLLLLMMMMMMMMDDDDDDDDLLLLLLLLEEEEEEEEEPPPPPPPGGGGTTTTTTTMMMMMMMMDDDDDDDDSSSSSSVVVVVVVRRRRRRRRRRRAAAAAGGGGPPPPPPPFFFFFFFFFFFGGGGQQQQQQQQQLLLLLLLLFFFFFFFFFFFRRRRRRRRRRRPPPPPPPDDDDDDDDNNNNNNNNFFFFFFFFFFFVVVVVVVFFFFFFFFFFFGGGGQQQQQQQQQTTTTTTTGGGGAAAAAGGGGNNNNNNNNNNNNNNNNWWWWWWWWWWWWWWAAAAAKKKKKKKKKGGGGHHHHHHHHHHYYYYYYYYYYYYTTTTTTTEEEEEEEEEGGGGAAAAAEEEEEEEEELLLLLLLLIIIIIIIIDDDDDDDDSSSSSSVVVVVVVLLLLLLLLDDDDDDDDVVVVVVVVVVVVVVRRRRRRRRRRRKKKKKKKKKEEEEEEEEEAAAAAEEEEEEEEEGGGGCCCCCCDDDDDDDDCCCCCCLLLLLLLLQQQQQQQQQGGGGFFFFFFFFFFFQQQQQQQQQIIIIIIIITTTTTTTHHHHHHHHHHSSSSSSLLLLLLLLGGGGGGGGGGGGTTTTTTTGGGGSSSSSSGGGGMMMMMMMMGGGGTTTTTTTLLLLLLLLLLLLLLLLIIIIIIIISSSSSSKKKKKKKKKIIIIIIIIRRRRRRRRRRREEEEEEEEEEEEEEEEEEYYYYYYYYYYYYPPPPPPPDDDDDDDDRRRRRRRRRRRIIIIIIIIMMMMMMMMEEEEEEEEETTTTTTTFFFFFFFFFFFSSSSSSVVVVVVVFFFFFFFFFFFPPPPPPPSSSSSSPPPPPPPKKKKKKKKKVVVVVVVSSSSSSDDDDDDDDTTTTTTTVVVVVVVVVVVVVVEEEEEEEEEPPPPPPPYYYYYYYYYYYYNNNNNNNNAAAAATTTTTTTLLLLLLLLSSSSSSVVVVVVVHHHHHHHHHHQQQQQQQQQLLLLLLLLVVVVVVVEEEEEEEEENNNNNNNNAAAAADDDDDDDDEEEEEEEEEVVVVVVVMMMMMMMMVVVVVVVIIIIIIIIDDDDDDDDNNNNNNNNEEEEEEEEEAAAAALLLLLLLLYYYYYYYYYYYYDDDDDDDDIIIIIIIICCCCCCFFFFFFFFFFFRRRRRRRRRRRTTTTTTTLLLLLLLLKKKKKKKKKLLLLLLLLTTTTTTTTTTTTTTPPPPPPPTTTTTTTYYYYYYYYYYYYGGGGDDDDDDDDLLLLLLLLNNNNNNNNHHHHHHHHHHLLLLLLLLVVVVVVVSSSSSSAAAAACCCCCCIIIIIIIISSSSSSGGGGVVVVVVVTTTTTTTSSSSSSCCCCCCLLLLLLLLRRRRRRRRRRRFFFFFFFFFFFPPPPPPPGGGGQQQQQQQQQLLLLLLLLNNNNNNNNSSSSSSDDDDDDDDLLLLLLLLRRRRRRRRRRRKKKKKKKKKLLLLLLLLAAAAAVVVVVVVNNNNNNNNLLLLLLLLIIIIIIIIPPPPPPPFFFFFFFFFFFPPPPPPPRRRRRRRRRRRLLLLLLLLHHHHHHHHHHFFFFFFFFFFFFFFFFFFFFFFMMMMMMMMVVVVVVVGGGGFFFFFFFFFFFAAAAAPPPPPPPLLLLLLLLTTTTTTTSSSSSSRRRRRRRRRRRGGGGSSSSSSQQQQQQQQQQQQQQQQQQYYYYYYYYYYYYRRRRRRRRRRRAAAAALLLLLLLLTTTTTTTVVVVVVVPPPPPPPEEEEEEEEELLLLLLLLTTTTTTTQQQQQQQQQQQQQQQQQQMMMMMMMMFFFFFFFFFFFDDDDDDDDAAAAAKKKKKKKKKNNNNNNNNMMMMMMMMMMMMMMMMCCCCCCAAAAASSSSSSDDDDDDDDPPPPPPPRRRRRRRRRRRHHHHHHHHHHGGGGRRRRRRRRRRRYYYYYYYYYYYYLLLLLLLLTTTTTTTAAAAASSSSSSAAAAAMMMMMMMMFFFFFFFFFFFRRRRRRRRRRRGGGGRRRRRRRRRRRMMMMMMMMSSSSSSTTTTTTTKKKKKKKKKEEEEEEEEEVVVVVVVDDDDDDDDEEEEEEEEEQQQQQQQQQMMMMMMMMLLLLLLLLNNNNNNNNVVVVVVVQQQQQQQQQNNNNNNNNKKKKKKKKKNNNNNNNNSSSSSSSSSSSSYYYYYYYYYYYYFFFFFFFFFFFVVVVVVVEEEEEEEEEWWWWWWWWWWWWWWIIIIIIIIPPPPPPPNNNNNNNNNNNNNNNNIIIIIIIIKKKKKKKKKSSSSSSSSSSSSVVVVVVVCCCCCCDDDDDDDDIIIIIIIIPPPPPPPPPPPPPPKKKKKKKKKGGGGLLLLLLLLKKKKKKKKKLLLLLLLLAAAAASSSSSSTTTTTTTFFFFFFFFFFFIIIIIIIIGGGGNNNNNNNNSSSSSSTTTTTTTAAAAAIIIIIIIIQQQQQQQQQEEEEEEEEEMMMMMMMMFFFFFFFFFFFKKKKKKKKKRRRRRRRRRRRVVVVVVVAAAAAEEEEEEEEEQQQQQQQQQFFFFFFFFFFFTTTTTTTAAAAAMMMMMMMMFFFFFFFFFFFRRRRRRRRRRRRRRRRRRRRRRKKKKKKKKKAAAAAFFFFFFFFFFFLLLLLLLLHHHHHHHHHHWWWWWWWWWWWWWWYYYYYYYYYYYYTTTTTTTGGGGEEEEEEEEEGGGGMMMMMMMMDDDDDDDDEEEEEEEEEMMMMMMMMEEEEEEEEEFFFFFFFFFFFTTTTTTTEEEEEEEEEAAAAAEEEEEEEEESSSSSSNNNNNNNNMMMMMMMMNNNNNNNNDDDDDDDDLLLLLLLLVVVVVVVSSSSSSEEEEEEEEEYYYYYYYYYYYYQQQQQQQQQQQQQQQQQQYYYYYYYYYYYYQQQQQQQQQDDDDDDDDAAAAATTTTTTTAAAAAEEEEEEEEEEEEEEEEEEEEEEEEEEEGGGGEEEEEEEEEYYYYYYYYYYYYVVVVVVVEEEEEEEEEDDDDDDDDEEEEEEEEEDDDDDDDDEEEEEEEEEMMMMMMMMDDDDDDDDGGGGMMMMMMMMM

SEQ ID NO: 219 - protein, 3489 aa, Euplotes focardii
MMMMMMMMRRRRRRRRRRREEEEEEEEEIIIIIIIIVVVVVVVHHHHHHHHHHIIIIIIIIQQQQQQQQQAAAAAGGGGQQQQQQQQQCCCCCCGGGGNNNNNNNNQQQQQQQQQIIIIIIIIGGGGAAAAAKKKKKKKKKFFFFFFFFFFFWWWWWWWWWWWWWWEEEEEEEEEVVVVVVVIIIIIIIISSSSSSDDDDDDDDEEEEEEEEEHHHHHHHHHHGGGGVVVVVVVDDDDDDDDPPPPPPPTTTTTTTGGGGTTTTTTTYYYYYYYYYYYYHHHHHHHHHHGGGGDDDDDDDDSSSSSSDDDDDDDDLLLLLLLLQQQQQQQQQLLLLLLLLEEEEEEEEERRRRRRRRRRRIIIIIIIINNNNNNNNVVVVVVVYYYYYYYYYYYYFFFFFFFFFFFNNNNNNNNEEEEEEEEEAAAAATTTTTTTGGGGRRRRRRRRRRRKKKKKKKKKIIIIIIIICCCCCCPPPPPPPRRRRRRRRRRRAAAAAMMMMMMMMLLLLLLLLMMMMMMMMDDDDDDDDLLLLLLLLEEEEEEEEEPPPPPPPGGGGTTTTTTTMMMMMMMMDDDDDDDDSSSSSSVVVVVVVRRRRRRRRRRRAAAAAGGGGPPPPPPPFFFFFFFFFFFGGGGQQQQQQQQQLLLLLLLLFFFFFFFFFFFRRRRRRRRRRRPPPPPPPDDDDDDDDNNNNNNNNFFFFFFFFFFFVVVVVVVFFFFFFFFFFFGGGGQQQQQQQQQSSSSSSGGGGAAAAAGGGGNNNNNNNNNNNNNNNNWWWWWWWWWWWWWWAAAAAKKKKKKKKKGGGGHHHHHHHHHHYYYYYYYYYYYYTTTTTTTEEEEEEEEEGGGGAAAAAEEEEEEEEELLLLLLLLIIIIIIIIDDDDDDDDSSSSSSVVVVVVVLLLLLLLLDDDDDDDDVVVVVVVVVVVVVVRRRRRRRRRRRKKKKKKKKKEEEEEEEEEAAAAAEEEEEEEEEGGGGCCCCCCDDDDDDDDCCCCCCLLLLLLLLQQQQQQQQQGGGGFFFFFFFFFFFQQQQQQQQQIIIIIIIITTTTTTTHHHHHHHHHHSSSSSSLLLLLLLLGGGGGGGGGGGGTTTTTTTGGGGSSSSSSGGGGMMMMMMMMGGGGTTTTTTTLLLLLLLLLLLLLLLLIIIIIIIISSSSSSKKKKKKKKKIIIIIIIIRRRRRRRRRRREEEEEEEEEKKKKKKKKKYYYYYYYYYYYYPPPPPPPDDDDDDDDRRRRRRRRRRRIIIIIIIIMMMMMMMMEEEEEEEEETTTTTTTFFFFFFFFFFFSSSSSSVVVVVVVFFFFFFFFFFFPPPPPPPSSSSSSPPPPPPPKKKKKKKKKVVVVVVVSSSSSSDDDDDDDDTTTTTTTVVVVVVVVVVVVVVEEEEEEEEEPPPPPPPYYYYYYYYYYYYNNNNNNNNAAAAATTTTTTTLLLLLLLLSSSSSSVVVVVVVHHHHHHHHHHQQQQQQQQQLLLLLLLLVVVVVVVEEEEEEEEENNNNNNNNAAAAADDDDDDDDEEEEEEEEEVVVVVVVMMMMMMMMCCCCCCIIIIIIIIDDDDDDDDNNNNNNNNEEEEEEEEEAAAAALLLLLLLLYYYYYYYYYYYYDDDDDDDDIIIIIIIICCCCCCFFFFFFFFFFFRRRRRRRRRRRTTTTTTTLLLLLLLLKKKKKKKKKPPPPPPPTTTTTTTTTTTTTTPPPPPPPTTTTTTTYYYYYYYYYYYYGGGGDDDDDDDDLLLLLLLLNNNNNNNNHHHHHHHHHHLLLLLLLLVVVVVVVSSSSSSAAAAAVVVVVVVIIIIIIIISSSSSSGGGGVVVVVVVTTTTTTTSSSSSSCCCCCCLLLLLLLLRRRRRRRRRRRFFFFFFFFFFFPPPPPPPGGGGQQQQQQQQQLLLLLLLLNNNNNNNNSSSSSSDDDDDDDDLLLLLLLLRRRRRRRRRRRKKKKKKKKKLLLLLLLLAAAAAVVVVVVVNNNNNNNNLLLLLLLLIIIIIIIIPPPPPPPFFFFFFFFFFFPPPPPPPRRRRRRRRRRRLLLLLLLLHHHHHHHHHHFFFFFFFFFFFFFFFFFFFFFFMMMMMMMMIIIIIIIIGGGGFFFFFFFFFFFAAAAAPPPPPPPLLLLLLLLTTTTTTTSSSSSSRRRRRRRRRRRGGGGSSSSSSQQQQQQQQQQQQQQQQQQYYYYYYYYYYYYRRRRRRRRRRRAAAAALLLLLLLLTTTTTTTVVVVVVVPPPPPPPEEEEEEEEELLLLLLLLTTTTTTTQQQQQQQQQQQQQQQQQQMMMMMMMMFFFFFFFFFFFDDDDDDDDAAAAAKKKKKKKKKNNNNNNNNMMMMMMMMMMMMMMMMCCCCCCAAAAASSSSSSDDDDDDDDPPPPPPPRRRRRRRRRRRHHHHHHHHHHGGGGRRRRRRRRRRRYYYYYYYYYYYYLLLLLLLLTTTTTTTAAAAASSSSSSAAAAAMMMMMMMMFFFFFFFFFFFRRRRRRRRRRRGGGGRRRRRRRRRRRMMMMMMMMSSSSSSTTTTTTTKKKKKKKKKEEEEEEEEEVVVVVVVDDDDDDDDEEEEEEEEEQQQQQQQQQMMMMMMMMLLLLLLLLNNNNNNNNVVVVVVVQQQQQQQQQNNNNNNNNKKKKKKKKKNNNNNNNNSSSSSSSSSSSSYYYYYYYYYYYYFFFFFFFFFFFVVVVVVVEEEEEEEEEWWWWWWWWWWWWWWIIIIIIIIPPPPPPPNNNNNNNNNNNNNNNNIIIIIIIIKKKKKKKKKSSSSSSSSSSSSVVVVVVVCCCCCCDDDDDDDDIIIIIIIIPPPPPPPPPPPPPPKKKKKKKKKGGGGLLLLLLLLKKKKKKKKKMMMMMMMMSSSSSSSSSSSSTTTTTTTFFFFFFFFFFFIIIIIIIIGGGGNNNNNNNNSSSSSSTTTTTTTAAAAAIIIIIIIIQQQQQQQQQEEEEEEEEEMMMMMMMMFFFFFFFFFFFKKKKKKKKKRRRRRRRRRRRVVVVVVVAAAAAEEEEEEEEEQQQQQQQQQFFFFFFFFFFFTTTTTTTAAAAAMMMMMMMMFFFFFFFFFFFRRRRRRRRRRRRRRRRRRRRRRKKKKKKKKKAAAAAFFFFFFFFFFFLLLLLLLLHHHHHHHHHHWWWWWWWWWWWWWWYYYYYYYYYYYYTTTTTTTGGGGEEEEEEEEEGGGGMMMMMMMMDDDDDDDDEEEEEEEEEMMMMMMMMEEEEEEEEEFFFFFFFFFFFTTTTTTTEEEEEEEEEAAAAAEEEEEEEEESSSSSSNNNNNNNNMMMMMMMMNNNNNNNNDDDDDDDDLLLLLLLLVVVVVVVSSSSSSEEEEEEEEEYYYYYYYYYYYYQQQQQQQQQQQQQQQQQQYYYYYYYYYYYYQQQQQQQQQDDDDDDDDAAAAATTTTTTTAAAAAEEEEEEEEEEEEEEEEEEEEEEEEEEEGGGGEEEEEEEEEFFFFFFFFFFFDDDDDDDDDDDDDDDDEEEEEEEEEEEEEEEEEEEEEEEEEEEMMMMMMMMDDDDDDDDVVVVVVVV

SEQ ID NO: 220 - protein, 3478 aa, Euplotes octocarinatus
MMMMMMMMRRRRRRRRRRREEEEEEEEEIIIIIIIIVVVVVVVHHHHHHHHHHVVVVVVVQQQQQQQQQGGGGGGGGQQQQQQQQQCCCCCCGGGGNNNNNNNNQQQQQQQQQIIIIIIIIGGGGAAAAAKKKKKKKKKFFFFFFFFFFFWWWWWWWWWWWWWWEEEEEEEEEVVVVVVVIIIIIIIISSSSSSDDDDDDDDEEEEEEEEEHHHHHHHHHHGGGGVVVVVVVEEEEEEEEEPPPPPPPTTTTTTTGGGGAAAAAYYYYYYYYYYYYHHHHHHHHHHGGGGDDDDDDDDSSSSSSDDDDDDDDLLLLLLLLQQQQQQQQQLLLLLLLLEEEEEEEEERRRRRRRRRRRIIIIIIIINNNNNNNNVVVVVVVYYYYYYYYYYYYYYYYYYYYYYYYNNNNNNNNEEEEEEEEEAAAAATTTTTTTGGGGGGGGRRRRRRRRRRRYYYYYYYYYYYYVVVVVVVPPPPPPPRRRRRRRRRRRAAAAAVVVVVVVLLLLLLLLMMMMMMMMDDDDDDDDLLLLLLLLEEEEEEEEEPPPPPPPGGGGTTTTTTTMMMMMMMMDDDDDDDDSSSSSSVVVVVVVRRRRRRRRRRRAAAAAGGGGPPPPPPPFFFFFFFFFFFGGGGQQQQQQQQQLLLLLLLLFFFFFFFFFFFRRRRRRRRRRRPPPPPPPDDDDDDDDNNNNNNNNFFFFFFFFFFFVVVVVVVFFFFFFFFFFFGGGGQQQQQQQQQTTTTTTTGGGGAAAAAGGGGNNNNNNNNNNNNNNNNWWWWWWWWWWWWWWAAAAAKKKKKKKKKGGGGHHHHHHHHHHYYYYYYYYYYYYTTTTTTTEEEEEEEEEGGGGAAAAAEEEEEEEEELLLLLLLLIIIIIIIIDDDDDDDDSSSSSSVVVVVVVLLLLLLLLDDDDDDDDVVVVVVVVVVVVVVRRRRRRRRRRRKKKKKKKKKEEEEEEEEEAAAAAEEEEEEEEEGGGGCCCCCCDDDDDDDDCCCCCCLLLLLLLLQQQQQQQQQGGGGFFFFFFFFFFFQQQQQQQQQIIIIIIIITTTTTTTHHHHHHHHHHSSSSSSLLLLLLLLGGGGGGGGGGGGTTTTTTTGGGGSSSSSSGGGGMMMMMMMMGGGGTTTTTTTLLLLLLLLLLLLLLLLIIIIIIIISSSSSSKKKKKKKKKIIIIIIIIRRRRRRRRRRREEEEEEEEEEEEEEEEEEYYYYYYYYYYYYPPPPPPPDDDDDDDDRRRRRRRRRRRIIIIIIIIMMMMMMMMEEEEEEEEETTTTTTTFFFFFFFFFFFSSSSSSVVVVVVVFFFFFFFFFFFPPPPPPPSSSSSSPPPPPPPKKKKKKKKKVVVVVVVSSSSSSDDDDDDDDTTTTTTTVVVVVVVVVVVVVVEEEEEEEEEPPPPPPPYYYYYYYYYYYYNNNNNNNNAAAAATTTTTTTLLLLLLLLSSSSSSVVVVVVVHHHHHHHHHHQQQQQQQQQLLLLLLLLVVVVVVVEEEEEEEEENNNNNNNNAAAAADDDDDDDDEEEEEEEEEVVVVVVVMMMMMMMMVVVVVVVIIIIIIIIDDDDDDDDNNNNNNNNEEEEEEEEEAAAAALLLLLLLLYYYYYYYYYYYYDDDDDDDDIIIIIIIICCCCCCFFFFFFFFFFFRRRRRRRRRRRTTTTTTTLLLLLLLLKKKKKKKKKLLLLLLLLTTTTTTTTTTTTTTPPPPPPPTTTTTTTYYYYYYYYYYYYGGGGDDDDDDDDLLLLLLLLNNNNNNNNHHHHHHHHHHLLLLLLLLVVVVVVVSSSSSSAAAAACCCCCCIIIIIIIISSSSSSGGGGVVVVVVVTTTTTTTAAAAACCCCCCLLLLLLLLRRRRRRRRRRRFFFFFFFFFFFPPPPPPPGGGGQQQQQQQQQLLLLLLLLNNNNNNNNSSSSSSDDDDDDDDLLLLLLLLRRRRRRRRRRRKKKKKKKKKLLLLLLLLAAAAAVVVVVVVNNNNNNNNLLLLLLLLIIIIIIIIPPPPPPPFFFFFFFFFFFPPPPPPPRRRRRRRRRRRLLLLLLLLHHHHHHHHHHFFFFFFFFFFFFFFFFFFFFFFMMMMMMMMIIIIIIIIGGGGFFFFFFFFFFFAAAAAPPPPPPPLLLLLLLLTTTTTTTSSSSSSRRRRRRRRRRRGGGGSSSSSSQQQQQQQQQQQQQQQQQQYYYYYYYYYYYYRRRRRRRRRRRAAAAALLLLLLLLTTTTTTTVVVVVVVPPPPPPPEEEEEEEEELLLLLLLLTTTTTTTQQQQQQQQQQQQQQQQQQMMMMMMMMFFFFFFFFFFFDDDDDDDDAAAAAKKKKKKKKKNNNNNNNNMMMMMMMMMMMMMMMMSSSSSSAAAAASSSSSSDDDDDDDDPPPPPPPRRRRRRRRRRRHHHHHHHHHHGGGGRRRRRRRRRRRYYYYYYYYYYYYLLLLLLLLTTTTTTTAAAAASSSSSSAAAAAMMMMMMMMFFFFFFFFFFFRRRRRRRRRRRGGGGRRRRRRRRRRRMMMMMMMMSSSSSSTTTTTTTKKKKKKKKKEEEEEEEEEVVVVVVVDDDDDDDDEEEEEEEEEQQQQQQQQQMMMMMMMMLLLLLLLLNNNNNNNNVVVVVVVQQQQQQQQQNNNNNNNNKKKKKKKKKNNNNNNNNSSSSSSSSSSSSYYYYYYYYYYYYFFFFFFFFFFFVVVVVVVEEEEEEEEEWWWWWWWWWWWWWWIIIIIIIIPPPPPPPNNNNNNNNNNNNNNNNIIIIIIIIKKKKKKKKKSSSSSSSSSSSSVVVVVVVCCCCCCDDDDDDDDIIIIIIIIPPPPPPPPPPPPPPKKKKKKKKKGGGGLLLLLLLLKKKKKKKKKMMMMMMMMSSSSSSSSSSSSTTTTTTTFFFFFFFFFFFVVVVVVVGGGGNNNNNNNNSSSSSSTTTTTTTAAAAAIIIIIIIIQQQQQQQQQEEEEEEEEEMMMMMMMMFFFFFFFFFFFKKKKKKKKKRRRRRRRRRRRVVVVVVVAAAAAEEEEEEEEEQQQQQQQQQFFFFFFFFFFFTTTTTTTAAAAAMMMMMMMMFFFFFFFFFFFRRRRRRRRRRRRRRRRRRRRRRKKKKKKKKKAAAAAFFFFFFFFFFFLLLLLLLLHHHHHHHHHHWWWWWWWWWWWWWWYYYYYYYYYYYYTTTTTTTGGGGEEEEEEEEEGGGGMMMMMMMMDDDDDDDDEEEEEEEEEMMMMMMMMEEEEEEEEEFFFFFFFFFFFTTTTTTTEEEEEEEEEAAAAAEEEEEEEEESSSSSSNNNNNNNNMMMMMMMMNNNNNNNNDDDDDDDDLLLLLLLLVVVVVVVSSSSSSEEEEEEEEEYYYYYYYYYYYYQQQQQQQQQQQQQQQQQQYYYYYYYYYYYYQQQQQQQQQDDDDDDDDAAAAATTTTTTTAAAAAEEEEEEEEEEEEEEEEEEEEEEEEEEEGGGGEEEEEEEEEMMMMMMMMDDDDDDDDEEEEEEEEEEEEEEEEEEEEEEEEEEEGGGGAAAAAMMMMMMMMEEEEEEEEEE

SEQ ID NO: 221 - protein, 3502 aa, Giardia intestinalis
MMMMMMMMRRRRRRRRRRREEEEEEEEEIIIIIIIIVVVVVVVHHHHHHHHHHIIIIIIIIQQQQQQQQQAAAAAGGGGQQQQQQQQQCCCCCCGGGGNNNNNNNNQQQQQQQQQIIIIIIIIGGGGAAAAAKKKKKKKKKFFFFFFFFFFFWWWWWWWWWWWWWWEEEEEEEEEVVVVVVVIIIIIIIISSSSSSDDDDDDDDEEEEEEEEEHHHHHHHHHHGGGGVVVVVVVDDDDDDDDPPPPPPPSSSSSSGGGGEEEEEEEEEYYYYYYYYYYYYRRRRRRRRRRRGGGGDDDDDDDDSSSSSSEEEEEEEEELLLLLLLLQQQQQQQQQIIIIIIIIEEEEEEEEERRRRRRRRRRRIIIIIIIINNNNNNNNVVVVVVVYYYYYYYYYYYYFFFFFFFFFFFNNNNNNNNEEEEEEEEEAAAAAAAAAAGGGGGGGGRRRRRRRRRRRYYYYYYYYYYYYVVVVVVVPPPPPPPRRRRRRRRRRRAAAAAIIIIIIIILLLLLLLLVVVVVVVDDDDDDDDLLLLLLLLEEEEEEEEEPPPPPPPGGGGTTTTTTTMMMMMMMMDDDDDDDDSSSSSSVVVVVVVRRRRRRRRRRRAAAAAGGGGPPPPPPPFFFFFFFFFFFGGGGQQQQQQQQQIIIIIIIIFFFFFFFFFFFRRRRRRRRRRRPPPPPPPDDDDDDDDNNNNNNNNFFFFFFFFFFFVVVVVVVFFFFFFFFFFFGGGGQQQQQQQQQSSSSSSGGGGAAAAAGGGGNNNNNNNNNNNNNNNNWWWWWWWWWWWWWWAAAAAKKKKKKKKKGGGGHHHHHHHHHHYYYYYYYYYYYYTTTTTTTEEEEEEEEEGGGGAAAAAEEEEEEEEELLLLLLLLVVVVVVVDDDDDDDDAAAAAVVVVVVVLLLLLLLLDDDDDDDDVVVVVVVVVVVVVVRRRRRRRRRRRKKKKKKKKKRRRRRRRRRRRSSSSSSEEEEEEEEEAAAAACCCCCCDDDDDDDDCCCCCCLLLLLLLLQQQQQQQQQGGGGFFFFFFFFFFFQQQQQQQQQIIIIIIIICCCCCCHHHHHHHHHHSSSSSSLLLLLLLLGGGGGGGGGGGGTTTTTTTGGGGAAAAAGGGGMMMMMMMMGGGGTTTTTTTLLLLLLLLLLLLLLLLIIIIIIIIAAAAAKKKKKKKKKIIIIIIIIRRRRRRRRRRREEEEEEEEEEEEEEEEEEYYYYYYYYYYYYPPPPPPPDDDDDDDDRRRRRRRRRRRMMMMMMMMMMMMMMMMCCCCCCTTTTTTTFFFFFFFFFFFSSSSSSVVVVVVVVVVVVVVPPPPPPPSSSSSSPPPPPPPKKKKKKKKKVVVVVVVSSSSSSDDDDDDDDTTTTTTTVVVVVVVVVVVVVVEEEEEEEEEPPPPPPPYYYYYYYYYYYYNNNNNNNNAAAAATTTTTTTLLLLLLLLSSSSSSVVVVVVVHHHHHHHHHHQQQQQQQQQLLLLLLLLVVVVVVVEEEEEEEEEHHHHHHHHHHAAAAADDDDDDDDEEEEEEEEEVVVVVVVFFFFFFFFFFFCCCCCCIIIIIIIIDDDDDDDDNNNNNNNNEEEEEEEEEAAAAALLLLLLLLYYYYYYYYYYYYDDDDDDDDIIIIIIIICCCCCCFFFFFFFFFFFRRRRRRRRRRRTTTTTTTLLLLLLLLKKKKKKKKKLLLLLLLLTTTTTTTCCCCCCPPPPPPPTTTTTTTYYYYYYYYYYYYGGGGDDDDDDDDLLLLLLLLNNNNNNNNHHHHHHHHHHLLLLLLLLVVVVVVVSSSSSSLLLLLLLLVVVVVVVMMMMMMMMSSSSSSGGGGCCCCCCTTTTTTTSSSSSSCCCCCCLLLLLLLLRRRRRRRRRRRFFFFFFFFFFFPPPPPPPGGGGQQQQQQQQQLLLLLLLLNNNNNNNNAAAAADDDDDDDDLLLLLLLLRRRRRRRRRRRKKKKKKKKKLLLLLLLLAAAAAVVVVVVVNNNNNNNNLLLLLLLLIIIIIIIIPPPPPPPFFFFFFFFFFFPPPPPPPRRRRRRRRRRRLLLLLLLLHHHHHHHHHHFFFFFFFFFFFFFFFFFFFFFFLLLLLLLLVVVVVVVGGGGFFFFFFFFFFFAAAAAPPPPPPPLLLLLLLLTTTTTTTSSSSSSRRRRRRRRRRRGGGGSSSSSSQQQQQQQQQIIIIIIIIYYYYYYYYYYYYRRRRRRRRRRRAAAAALLLLLLLLTTTTTTTVVVVVVVPPPPPPPEEEEEEEEELLLLLLLLVVVVVVVSSSSSSQQQQQQQQQMMMMMMMMFFFFFFFFFFFDDDDDDDDNNNNNNNNKKKKKKKKKNNNNNNNNMMMMMMMMMMMMMMMMAAAAAAAAAASSSSSSDDDDDDDDPPPPPPPRRRRRRRRRRRHHHHHHHHHHGGGGRRRRRRRRRRRYYYYYYYYYYYYLLLLLLLLTTTTTTTAAAAAAAAAAAAAAAMMMMMMMMFFFFFFFFFFFRRRRRRRRRRRGGGGRRRRRRRRRRRMMMMMMMMSSSSSSTTTTTTTKKKKKKKKKEEEEEEEEEVVVVVVVDDDDDDDDEEEEEEEEEQQQQQQQQQMMMMMMMMLLLLLLLLNNNNNNNNIIIIIIIIQQQQQQQQQNNNNNNNNKKKKKKKKKNNNNNNNNSSSSSSSSSSSSYYYYYYYYYYYYFFFFFFFFFFFVVVVVVVEEEEEEEEEWWWWWWWWWWWWWWIIIIIIIIPPPPPPPNNNNNNNNNNNNNNNNMMMMMMMMKKKKKKKKKVVVVVVVSSSSSSVVVVVVVCCCCCCDDDDDDDDIIIIIIIIPPPPPPPPPPPPPPRRRRRRRRRRRGGGGLLLLLLLLKKKKKKKKKMMMMMMMMAAAAAAAAAATTTTTTTFFFFFFFFFFFIIIIIIIIGGGGNNNNNNNNSSSSSSTTTTTTTCCCCCCIIIIIIIIQQQQQQQQQEEEEEEEEELLLLLLLLFFFFFFFFFFFKKKKKKKKKRRRRRRRRRRRVVVVVVVGGGGEEEEEEEEEQQQQQQQQQFFFFFFFFFFFSSSSSSAAAAAMMMMMMMMFFFFFFFFFFFRRRRRRRRRRRRRRRRRRRRRRKKKKKKKKKAAAAAFFFFFFFFFFFLLLLLLLLHHHHHHHHHHWWWWWWWWWWWWWWYYYYYYYYYYYYTTTTTTTGGGGEEEEEEEEEGGGGMMMMMMMMDDDDDDDDEEEEEEEEEMMMMMMMMEEEEEEEEEFFFFFFFFFFFTTTTTTTEEEEEEEEEAAAAAEEEEEEEEESSSSSSNNNNNNNNMMMMMMMMNNNNNNNNDDDDDDDDLLLLLLLLVVVVVVVSSSSSSEEEEEEEEEYYYYYYYYYYYYQQQQQQQQQQQQQQQQQQYYYYYYYYYYYYQQQQQQQQQEEEEEEEEEAAAAAGGGGVVVVVVVDDDDDDDDEEEEEEEEEGGGGEEEEEEEEEEEEEEEEEEFFFFFFFFFFFEEEEEEEEEEEEEEEEEEEEEEEEEEEEEEEEEEEEDDDDDDDDFFFFFFFFFFFGGGGDDDDDDDDEEEEEEEEEQQQQQQQQQQ

SEQ ID NO: 222 - protein, 3499 aa, Gibberella fujikuroi
MMMMMMMMRRRRRRRRRRREEEEEEEEEIIIIIIIIVVVVVVVHHHHHHHHHHLLLLLLLLQQQQQQQQQTTTTTTTGGGGQQQQQQQQQCCCCCCGGGGNNNNNNNNQQQQQQQQQIIIIIIIIGGGGAAAAAAAAAAFFFFFFFFFFFWWWWWWWWWWWWWWQQQQQQQQQTTTTTTTIIIIIIIISSSSSSGGGGEEEEEEEEEHHHHHHHHHHGGGGLLLLLLLLDDDDDDDDSSSSSSNNNNNNNNGGGGVVVVVVVYYYYYYYYYYYYNNNNNNNNGGGGTTTTTTTSSSSSSEEEEEEEEELLLLLLLLQQQQQQQQQLLLLLLLLEEEEEEEEERRRRRRRRRRRMMMMMMMMSSSSSSVVVVVVVYYYYYYYYYYYYFFFFFFFFFFFNNNNNNNNEEEEEEEEERRRRRRRRRRRSSSSSSGGGGNNNNNNNNKKKKKKKKKYYYYYYYYYYYYVVVVVVVPPPPPPPRRRRRRRRRRRAAAAAVVVVVVVLLLLLLLLVVVVVVVDDDDDDDDLLLLLLLLEEEEEEEEEPPPPPPPGGGGTTTTTTTMMMMMMMMDDDDDDDDAAAAAVVVVVVVRRRRRRRRRRRAAAAAGGGGPPPPPPPFFFFFFFFFFFGGGGQQQQQQQQQLLLLLLLLFFFFFFFFFFFRRRRRRRRRRRPPPPPPPDDDDDDDDNNNNNNNNFFFFFFFFFFFVVVVVVVFFFFFFFFFFFGGGGQQQQQQQQQSSSSSSGGGGAAAAAGGGGNNNNNNNNNNNNNNNNWWWWWWWWWWWWWWAAAAAKKKKKKKKKGGGGHHHHHHHHHHYYYYYYYYYYYYTTTTTTTEEEEEEEEEGGGGAAAAAEEEEEEEEELLLLLLLLVVVVVVVDDDDDDDDQQQQQQQQQVVVVVVVLLLLLLLLDDDDDDDDVVVVVVVVVVVVVVRRRRRRRRRRRRRRRRRRRRRREEEEEEEEEAAAAAEEEEEEEEEGGGGCCCCCCDDDDDDDDCCCCCCLLLLLLLLQQQQQQQQQGGGGFFFFFFFFFFFQQQQQQQQQIIIIIIIITTTTTTTHHHHHHHHHHSSSSSSLLLLLLLLGGGGGGGGGGGGTTTTTTTGGGGAAAAAGGGGMMMMMMMMGGGGTTTTTTTLLLLLLLLLLLLLLLLIIIIIIIISSSSSSKKKKKKKKKIIIIIIIIRRRRRRRRRRREEEEEEEEEEEEEEEEEEFFFFFFFFFFFPPPPPPPDDDDDDDDRRRRRRRRRRRMMMMMMMMMMMMMMMMAAAAATTTTTTTFFFFFFFFFFFSSSSSSVVVVVVVVVVVVVVPPPPPPPSSSSSSPPPPPPPKKKKKKKKKVVVVVVVSSSSSSDDDDDDDDTTTTTTTVVVVVVVVVVVVVVEEEEEEEEEPPPPPPPYYYYYYYYYYYYNNNNNNNNAAAAATTTTTTTLLLLLLLLSSSSSSVVVVVVVHHHHHHHHHHQQQQQQQQQLLLLLLLLVVVVVVVEEEEEEEEENNNNNNNNSSSSSSDDDDDDDDEEEEEEEEETTTTTTTFFFFFFFFFFFCCCCCCIIIIIIIIDDDDDDDDNNNNNNNNEEEEEEEEEAAAAALLLLLLLLYYYYYYYYYYYYDDDDDDDDIIIIIIIICCCCCCMMMMMMMMRRRRRRRRRRRTTTTTTTLLLLLLLLKKKKKKKKKLLLLLLLLSSSSSSNNNNNNNNPPPPPPPSSSSSSYYYYYYYYYYYYGGGGDDDDDDDDLLLLLLLLNNNNNNNNYYYYYYYYYYYYLLLLLLLLVVVVVVVSSSSSSAAAAAVVVVVVVMMMMMMMMSSSSSSGGGGVVVVVVVTTTTTTTTTTTTTTCCCCCCLLLLLLLLRRRRRRRRRRRFFFFFFFFFFFPPPPPPPGGGGQQQQQQQQQLLLLLLLLNNNNNNNNSSSSSSDDDDDDDDLLLLLLLLRRRRRRRRRRRKKKKKKKKKLLLLLLLLAAAAAVVVVVVVNNNNNNNNMMMMMMMMVVVVVVVPPPPPPPFFFFFFFFFFFPPPPPPPRRRRRRRRRRRLLLLLLLLHHHHHHHHHHFFFFFFFFFFFFFFFFFFFFFFMMMMMMMMVVVVVVVGGGGFFFFFFFFFFFAAAAAPPPPPPPLLLLLLLLTTTTTTTSSSSSSRRRRRRRRRRRGGGGAAAAAHHHHHHHHHHSSSSSSFFFFFFFFFFFRRRRRRRRRRRAAAAAVVVVVVVSSSSSSVVVVVVVPPPPPPPEEEEEEEEELLLLLLLLTTTTTTTQQQQQQQQQQQQQQQQQQMMMMMMMMFFFFFFFFFFFDDDDDDDDPPPPPPPKKKKKKKKKNNNNNNNNMMMMMMMMMMMMMMMMAAAAAAAAAASSSSSSDDDDDDDDFFFFFFFFFFFRRRRRRRRRRRNNNNNNNNGGGGRRRRRRRRRRRYYYYYYYYYYYYLLLLLLLLTTTTTTTCCCCCCSSSSSSAAAAAIIIIIIIIFFFFFFFFFFFRRRRRRRRRRRGGGGRRRRRRRRRRRVVVVVVVAAAAAMMMMMMMMKKKKKKKKKEEEEEEEEEVVVVVVVEEEEEEEEEDDDDDDDDQQQQQQQQQMMMMMMMMRRRRRRRRRRRNNNNNNNNVVVVVVVQQQQQQQQQNNNNNNNNKKKKKKKKKNNNNNNNNSSSSSSSSSSSSYYYYYYYYYYYYFFFFFFFFFFFVVVVVVVEEEEEEEEEWWWWWWWWWWWWWWIIIIIIIIPPPPPPPNNNNNNNNNNNNNNNNIIIIIIIIQQQQQQQQQTTTTTTTAAAAALLLLLLLLCCCCCCAAAAAIIIIIIIIPPPPPPPPPPPPPPRRRRRRRRRRRGGGGLLLLLLLLTTTTTTTMMMMMMMMSSSSSSSSSSSSTTTTTTTFFFFFFFFFFFIIIIIIIIGGGGNNNNNNNNSSSSSSTTTTTTTSSSSSSIIIIIIIIQQQQQQQQQEEEEEEEEELLLLLLLLFFFFFFFFFFFKKKKKKKKKRRRRRRRRRRRVVVVVVVGGGGEEEEEEEEEQQQQQQQQQFFFFFFFFFFFTTTTTTTAAAAAMMMMMMMMFFFFFFFFFFFRRRRRRRRRRRRRRRRRRRRRRKKKKKKKKKAAAAAFFFFFFFFFFFLLLLLLLLHHHHHHHHHHWWWWWWWWWWWWWWYYYYYYYYYYYYTTTTTTTGGGGEEEEEEEEEGGGGMMMMMMMMDDDDDDDDEEEEEEEEEMMMMMMMMEEEEEEEEEFFFFFFFFFFFTTTTTTTEEEEEEEEEAAAAAEEEEEEEEESSSSSSNNNNNNNNMMMMMMMMNNNNNNNNDDDDDDDDLLLLLLLLVVVVVVVSSSSSSEEEEEEEEEYYYYYYYYYYYYQQQQQQQQQQQQQQQQQQYYYYYYYYYYYYQQQQQQQQQDDDDDDDDAAAAAGGGGIIIIIIIIDDDDDDDDEEEEEEEEEEEEEEEEEEEEEEEEEEEEEEEEEEEEEEEEEEEEEYYYYYYYYYYYYEEEEEEEEEEEEEEEEEEEEEEEEEEELLLLLLLLPPPPPPPEEEEEEEEEGGGGEEEEEEEEEEEEEEEEEEE

SEQ ID NO: 223 - protein, 2676 aa, Haliotis discus
SSSSSSVVVVVVVRRRRRRRRRRRSSSSSSGGGGPPPPPPPFFFFFFFFFFFGGGGQQQQQQQQQIIIIIIIIFFFFFFFFFFFRRRRRRRRRRRPPPPPPPDDDDDDDDNNNNNNNNFFFFFFFFFFFVVVVVVVFFFFFFFFFFFGGGGQQQQQQQQQSSSSSSGGGGAAAAAGGGGNNNNNNNNNNNNNNNNWWWWWWWWWWWWWWAAAAAKKKKKKKKKGGGGHHHHHHHHHHYYYYYYYYYYYYTTTTTTTEEEEEEEEEGGGGAAAAAEEEEEEEEELLLLLLLLVVVVVVVDDDDDDDDSSSSSSVVVVVVVLLLLLLLLDDDDDDDDVVVVVVVVVVVVVVRRRRRRRRRRRKKKKKKKKKEEEEEEEEEAAAAAEEEEEEEEESSSSSSCCCCCCDDDDDDDDCCCCCCLLLLLLLLQQQQQQQQQGGGGFFFFFFFFFFFQQQQQQQQQLLLLLLLLTTTTTTTHHHHHHHHHHSSSSSSLLLLLLLLGGGGGGGGGGGGTTTTTTTGGGGSSSSSSGGGGMMMMMMMMGGGGTTTTTTTLLLLLLLLLLLLLLLLIIIIIIIISSSSSSKKKKKKKKKIIIIIIIIRRRRRRRRRRREEEEEEEEEEEEEEEEEEYYYYYYYYYYYYPPPPPPPDDDDDDDDRRRRRRRRRRRIIIIIIIIMMMMMMMMNNNNNNNNTTTTTTTFFFFFFFFFFFSSSSSSVVVVVVVVVVVVVVPPPPPPPSSSSSSPPPPPPPKKKKKKKKKVVVVVVVSSSSSSDDDDDDDDTTTTTTTVVVVVVVVVVVVVVEEEEEEEEEPPPPPPPYYYYYYYYYYYYNNNNNNNNAAAAATTTTTTTLLLLLLLLSSSSSSVVVVVVVHHHHHHHHHHQQQQQQQQQLLLLLLLLVVVVVVVEEEEEEEEENNNNNNNNTTTTTTTDDDDDDDDEEEEEEEEETTTTTTTYYYYYYYYYYYYCCCCCCIIIIIIIIDDDDDDDDNNNNNNNNEEEEEEEEEAAAAALLLLLLLLYYYYYYYYYYYYDDDDDDDDIIIIIIIICCCCCCFFFFFFFFFFFRRRRRRRRRRRTTTTTTTLLLLLLLLKKKKKKKKKLLLLLLLLTTTTTTTTTTTTTTPPPPPPPTTTTTTTYYYYYYYYYYYYGGGGDDDDDDDDLLLLLLLLNNNNNNNNHHHHHHHHHHLLLLLLLLVVVVVVVSSSSSSAAAAATTTTTTTMMMMMMMMSSSSSSGGGGVVVVVVVTTTTTTTTTTTTTTCCCCCCLLLLLLLLRRRRRRRRRRRFFFFFFFFFFFPPPPPPPGGGGQQQQQQQQQLLLLLLLLNNNNNNNNAAAAADDDDDDDDLLLLLLLLRRRRRRRRRRRKKKKKKKKKLLLLLLLLAAAAAVVVVVVVNNNNNNNNMMMMMMMMVVVVVVVPPPPPPPFFFFFFFFFFFPPPPPPPRRRRRRRRRRRLLLLLLLLHHHHHHHHHHFFFFFFFFFFFFFFFFFFFFFFMMMMMMMMPPPPPPPGGGGFFFFFFFFFFFAAAAAPPPPPPPLLLLLLLLTTTTTTTSSSSSSRRRRRRRRRRRGGGGSSSSSSQQQQQQQQQQQQQQQQQQYYYYYYYYYYYYRRRRRRRRRRRAAAAALLLLLLLLTTTTTTTVVVVVVVPPPPPPPEEEEEEEEELLLLLLLLTTTTTTTQQQQQQQQQQQQQQQQQQMMMMMMMMFFFFFFFFFFFDDDDDDDDAAAAAKKKKKKKKKNNNNNNNNMMMMMMMMMMMMMMMMAAAAAAAAAACCCCCCDDDDDDDDPPPPPPPRRRRRRRRRRRHHHHHHHHHHGGGGRRRRRRRRRRRYYYYYYYYYYYYLLLLLLLLTTTTTTTVVVVVVVAAAAAAAAAAIIIIIIIIFFFFFFFFFFFRRRRRRRRRRRGGGGRRRRRRRRRRRMMMMMMMMSSSSSSMMMMMMMMKKKKKKKKKEEEEEEEEEVVVVVVVDDDDDDDDEEEEEEEEEQQQQQQQQQMMMMMMMMLLLLLLLLNNNNNNNNVVVVVVVQQQQQQQQQNNNNNNNNKKKKKKKKKNNNNNNNNSSSSSSSSSSSSYYYYYYYYYYYYFFFFFFFFFFFVVVVVVVEEEEEEEEEWWWWWWWWWWWWWWIIIIIIIIPPPPPPPNNNNNNNNNNNNNNNNVVVVVVVKKKKKKKKKTTTTTTTAAAAAVVVVVVVCCCCCCDDDDDDDDIIIIIIIIPPPPPPPPPPPPPPRRRRRRRRRRRGGGGLLLLLLLLKKKKKKKKKMMMMMMMMSSSSSSAAAAATTTTTTTFFFFFFFFFFFIIIIIIIIGGGGNNNNNNNNSSSSSSTTTTTTTAAAAAIIIIIIIIQQQQQQQQQEEEEEEEEELLLLLLLLFFFFFFFFFFFKKKKKKKKKRRRRRRRRRRRIIIIIIIISSSSSSEEEEEEEEEQQQQQQQQQFFFFFFFFFFFTTTTTTTAAAAAMMMMMMMMFFFFFFFFFFFRRRRRRRRRRRRRRRRRRRRRRKKKKKKKKKAAAAAFFFFFFFFFFFLLLLLLLLHHHHHHHHHHWWWWWWWWWWWWWWYYYYYYYYYYYYTTTTTTTGGGGEEEEEEEEEGGGGMMMMMMMMDDDDDDDDEEEEEEEEEMMMMMMMMEEEEEEEEEFFFFFFFFFFFTTTTTTTEEEEEEEEEAAAAAEEEEEEEEESSSSSSNNNNNNNNMMMMMMMMM

SEQ ID NO: 224 - protein, 3511 aa, Hordeum vulgare
MMMMMMMMRRRRRRRRRRREEEEEEEEEIIIIIIIILLLLLLLLHHHHHHHHHHIIIIIIIIQQQQQQQQQGGGGGGGGQQQQQQQQQCCCCCCGGGGNNNNNNNNQQQQQQQQQIIIIIIIIGGGGAAAAAKKKKKKKKKFFFFFFFFFFFWWWWWWWWWWWWWWEEEEEEEEEVVVVVVVVVVVVVVCCCCCCDDDDDDDDEEEEEEEEEHHHHHHHHHHGGGGIIIIIIIIDDDDDDDDPPPPPPPTTTTTTTGGGGRRRRRRRRRRRYYYYYYYYYYYYTTTTTTTGGGGTTTTTTTSSSSSSDDDDDDDDLLLLLLLLQQQQQQQQQLLLLLLLLEEEEEEEEERRRRRRRRRRRVVVVVVVNNNNNNNNVVVVVVVYYYYYYYYYYYYYYYYYYYYYYYYNNNNNNNNEEEEEEEEEAAAAASSSSSSCCCCCCGGGGRRRRRRRRRRRFFFFFFFFFFFVVVVVVVPPPPPPPRRRRRRRRRRRAAAAAVVVVVVVLLLLLLLLMMMMMMMMDDDDDDDDLLLLLLLLEEEEEEEEEPPPPPPPGGGGTTTTTTTMMMMMMMMDDDDDDDDSSSSSSVVVVVVVRRRRRRRRRRRTTTTTTTGGGGPPPPPPPYYYYYYYYYYYYGGGGQQQQQQQQQIIIIIIIIFFFFFFFFFFFRRRRRRRRRRRPPPPPPPDDDDDDDDNNNNNNNNFFFFFFFFFFFVVVVVVVFFFFFFFFFFFGGGGQQQQQQQQQSSSSSSGGGGAAAAAGGGGNNNNNNNNNNNNNNNNWWWWWWWWWWWWWWAAAAAKKKKKKKKKGGGGHHHHHHHHHHYYYYYYYYYYYYTTTTTTTEEEEEEEEEGGGGAAAAAEEEEEEEEELLLLLLLLIIIIIIIIDDDDDDDDSSSSSSVVVVVVVLLLLLLLLDDDDDDDDVVVVVVVVVVVVVVRRRRRRRRRRRKKKKKKKKKEEEEEEEEEAAAAAEEEEEEEEENNNNNNNNCCCCCCDDDDDDDDCCCCCCLLLLLLLLQQQQQQQQQGGGGFFFFFFFFFFFQQQQQQQQQVVVVVVVCCCCCCHHHHHHHHHHSSSSSSLLLLLLLLGGGGGGGGGGGGTTTTTTTGGGGSSSSSSGGGGMMMMMMMMGGGGTTTTTTTLLLLLLLLLLLLLLLLIIIIIIIISSSSSSKKKKKKKKKIIIIIIIIRRRRRRRRRRREEEEEEEEEEEEEEEEEEYYYYYYYYYYYYPPPPPPPDDDDDDDDRRRRRRRRRRRMMMMMMMMMMMMMMMMLLLLLLLLTTTTTTTFFFFFFFFFFFSSSSSSVVVVVVVFFFFFFFFFFFPPPPPPPSSSSSSPPPPPPPKKKKKKKKKVVVVVVVSSSSSSDDDDDDDDTTTTTTTVVVVVVVVVVVVVVEEEEEEEEEPPPPPPPYYYYYYYYYYYYNNNNNNNNAAAAATTTTTTTLLLLLLLLSSSSSSVVVVVVVHHHHHHHHHHQQQQQQQQQLLLLLLLLVVVVVVVEEEEEEEEENNNNNNNNAAAAADDDDDDDDEEEEEEEEECCCCCCMMMMMMMMVVVVVVVLLLLLLLLDDDDDDDDNNNNNNNNEEEEEEEEEAAAAALLLLLLLLYYYYYYYYYYYYDDDDDDDDIIIIIIIICCCCCCFFFFFFFFFFFRRRRRRRRRRRTTTTTTTLLLLLLLLKKKKKKKKKLLLLLLLLTTTTTTTTTTTTTTPPPPPPPSSSSSSFFFFFFFFFFFGGGGDDDDDDDDLLLLLLLLNNNNNNNNHHHHHHHHHHLLLLLLLLIIIIIIIISSSSSSAAAAATTTTTTTMMMMMMMMSSSSSSGGGGVVVVVVVTTTTTTTCCCCCCCCCCCCLLLLLLLLRRRRRRRRRRRFFFFFFFFFFFPPPPPPPGGGGQQQQQQQQQLLLLLLLLNNNNNNNNSSSSSSDDDDDDDDLLLLLLLLRRRRRRRRRRRKKKKKKKKKLLLLLLLLAAAAAVVVVVVVNNNNNNNNLLLLLLLLIIIIIIIIPPPPPPPFFFFFFFFFFFPPPPPPPRRRRRRRRRRRLLLLLLLLHHHHHHHHHHFFFFFFFFFFFFFFFFFFFFFFMMMMMMMMVVVVVVVGGGGFFFFFFFFFFFAAAAAPPPPPPPLLLLLLLLTTTTTTTSSSSSSRRRRRRRRRRRGGGGSSSSSSQQQQQQQQQQQQQQQQQQYYYYYYYYYYYYRRRRRRRRRRRAAAAALLLLLLLLTTTTTTTVVVVVVVPPPPPPPEEEEEEEEELLLLLLLLTTTTTTTQQQQQQQQQQQQQQQQQQMMMMMMMMWWWWWWWWWWWWWWDDDDDDDDAAAAAKKKKKKKKKNNNNNNNNMMMMMMMMMMMMMMMMCCCCCCAAAAAAAAAADDDDDDDDPPPPPPPRRRRRRRRRRRHHHHHHHHHHGGGGRRRRRRRRRRRYYYYYYYYYYYYLLLLLLLLTTTTTTTAAAAASSSSSSAAAAAMMMMMMMMFFFFFFFFFFFRRRRRRRRRRRGGGGKKKKKKKKKMMMMMMMMSSSSSSTTTTTTTKKKKKKKKKEEEEEEEEEVVVVVVVDDDDDDDDEEEEEEEEEQQQQQQQQQMMMMMMMMIIIIIIIINNNNNNNNVVVVVVVQQQQQQQQQNNNNNNNNKKKKKKKKKNNNNNNNNSSSSSSSSSSSSYYYYYYYYYYYYFFFFFFFFFFFVVVVVVVEEEEEEEEEWWWWWWWWWWWWWWIIIIIIIIPPPPPPPNNNNNNNNNNNNNNNNVVVVVVVKKKKKKKKKSSSSSSSSSSSSVVVVVVVCCCCCCDDDDDDDDIIIIIIIIPPPPPPPPPPPPPPTTTTTTTGGGGLLLLLLLLSSSSSSMMMMMMMMAAAAASSSSSSTTTTTTTFFFFFFFFFFFVVVVVVVGGGGNNNNNNNNSSSSSSTTTTTTTSSSSSSIIIIIIIIQQQQQQQQQEEEEEEEEEMMMMMMMMFFFFFFFFFFFRRRRRRRRRRRRRRRRRRRRRRVVVVVVVSSSSSSEEEEEEEEEQQQQQQQQQFFFFFFFFFFFTTTTTTTAAAAAMMMMMMMMFFFFFFFFFFFRRRRRRRRRRRRRRRRRRRRRRKKKKKKKKKAAAAAFFFFFFFFFFFLLLLLLLLHHHHHHHHHHWWWWWWWWWWWWWWYYYYYYYYYYYYTTTTTTTGGGGEEEEEEEEEGGGGMMMMMMMMDDDDDDDDEEEEEEEEEMMMMMMMMEEEEEEEEEFFFFFFFFFFFTTTTTTTEEEEEEEEEAAAAAEEEEEEEEESSSSSSNNNNNNNNMMMMMMMMNNNNNNNNDDDDDDDDLLLLLLLLVVVVVVVSSSSSSEEEEEEEEEYYYYYYYYYYYYQQQQQQQQQQQQQQQQQQYYYYYYYYYYYYQQQQQQQQQDDDDDDDDAAAAATTTTTTTAAAAADDDDDDDDEEEEEEEEEEEEEEEEEEGGGGEEEEEEEEEYYYYYYYYYYYYEEEEEEEEEDDDDDDDDEEEEEEEEEDDDDDDDDQQQQQQQQQEEEEEEEEEAAAAAEEEEEEEEEDDDDDDDDDDDDDDDDMMMMMMMMM

SEQ ID NO: 225 - protein, 3503 aa, Leishmania mexicana
MMMMMMMMRRRRRRRRRRREEEEEEEEEIIIIIIIIVVVVVVVSSSSSSCCCCCCQQQQQQQQQAAAAAGGGGQQQQQQQQQCCCCCCGGGGNNNNNNNNQQQQQQQQQIIIIIIIIGGGGSSSSSSKKKKKKKKKFFFFFFFFFFFWWWWWWWWWWWWWWEEEEEEEEEVVVVVVVIIIIIIIIAAAAADDDDDDDDEEEEEEEEEHHHHHHHHHHGGGGVVVVVVVDDDDDDDDPPPPPPPTTTTTTTGGGGSSSSSSYYYYYYYYYYYYQQQQQQQQQGGGGDDDDDDDDSSSSSSDDDDDDDDLLLLLLLLQQQQQQQQQLLLLLLLLEEEEEEEEERRRRRRRRRRRIIIIIIIINNNNNNNNVVVVVVVYYYYYYYYYYYYFFFFFFFFFFFDDDDDDDDEEEEEEEEESSSSSSAAAAAGGGGGGGGRRRRRRRRRRRYYYYYYYYYYYYVVVVVVVPPPPPPPRRRRRRRRRRRAAAAAVVVVVVVLLLLLLLLMMMMMMMMDDDDDDDDLLLLLLLLEEEEEEEEEPPPPPPPGGGGTTTTTTTMMMMMMMMDDDDDDDDSSSSSSVVVVVVVRRRRRRRRRRRAAAAAGGGGPPPPPPPYYYYYYYYYYYYGGGGQQQQQQQQQLLLLLLLLFFFFFFFFFFFRRRRRRRRRRRPPPPPPPDDDDDDDDNNNNNNNNFFFFFFFFFFFIIIIIIIIFFFFFFFFFFFGGGGQQQQQQQQQSSSSSSGGGGAAAAAGGGGNNNNNNNNNNNNNNNNWWWWWWWWWWWWWWAAAAAKKKKKKKKKGGGGHHHHHHHHHHYYYYYYYYYYYYTTTTTTTEEEEEEEEEGGGGAAAAAEEEEEEEEELLLLLLLLIIIIIIIIDDDDDDDDSSSSSSVVVVVVVLLLLLLLLDDDDDDDDVVVVVVVCCCCCCRRRRRRRRRRRKKKKKKKKKEEEEEEEEEAAAAAEEEEEEEEESSSSSSCCCCCCDDDDDDDDCCCCCCLLLLLLLLQQQQQQQQQGGGGFFFFFFFFFFFQQQQQQQQQLLLLLLLLSSSSSSHHHHHHHHHHSSSSSSLLLLLLLLGGGGGGGGGGGGTTTTTTTGGGGSSSSSSGGGGMMMMMMMMGGGGTTTTTTTLLLLLLLLLLLLLLLLIIIIIIIISSSSSSKKKKKKKKKLLLLLLLLRRRRRRRRRRREEEEEEEEEEEEEEEEEEYYYYYYYYYYYYPPPPPPPDDDDDDDDRRRRRRRRRRRIIIIIIIIMMMMMMMMMMMMMMMMTTTTTTTFFFFFFFFFFFSSSSSSVVVVVVVIIIIIIIIPPPPPPPSSSSSSPPPPPPPRRRRRRRRRRRVVVVVVVSSSSSSDDDDDDDDTTTTTTTVVVVVVVVVVVVVVEEEEEEEEEPPPPPPPYYYYYYYYYYYYNNNNNNNNTTTTTTTTTTTTTTLLLLLLLLSSSSSSVVVVVVVHHHHHHHHHHQQQQQQQQQLLLLLLLLVVVVVVVEEEEEEEEENNNNNNNNSSSSSSDDDDDDDDEEEEEEEEESSSSSSMMMMMMMMCCCCCCIIIIIIIIDDDDDDDDNNNNNNNNEEEEEEEEEAAAAALLLLLLLLYYYYYYYYYYYYDDDDDDDDIIIIIIIICCCCCCFFFFFFFFFFFRRRRRRRRRRRTTTTTTTLLLLLLLLKKKKKKKKKLLLLLLLLTTTTTTTTTTTTTTPPPPPPPTTTTTTTFFFFFFFFFFFGGGGDDDDDDDDLLLLLLLLNNNNNNNNHHHHHHHHHHLLLLLLLLVVVVVVVAAAAAAAAAAVVVVVVVMMMMMMMMSSSSSSGGGGVVVVVVVTTTTTTTCCCCCCCCCCCCLLLLLLLLRRRRRRRRRRRFFFFFFFFFFFPPPPPPPGGGGQQQQQQQQQLLLLLLLLNNNNNNNNSSSSSSDDDDDDDDLLLLLLLLRRRRRRRRRRRNNNNNNNNRRRRRRRRRRRLLLLLLLLAAAAAVVVVVVVNNNNNNNNLLLLLLLLVVVVVVVPPPPPPPFFFFFFFFFFFPPPPPPPRRRRRRRRRRRLLLLLLLLHHHHHHHHHHFFFFFFFFFFFFFFFFFFFFFFMMMMMMMMMMMMMMMMGGGGFFFFFFFFFFFAAAAAPPPPPPPLLLLLLLLTTTTTTTSSSSSSRRRRRRRRRRRGGGGSSSSSSQQQQQQQQQEEEEEEEEEYYYYYYYYYYYYRRRRRRRRRRRQQQQQQQQQGGGGLLLLLLLLSSSSSSVVVVVVVAAAAADDDDDDDDVVVVVVVTTTTTTTQQQQQQQQQQQQQQQQQQMMMMMMMMFFFFFFFFFFFDDDDDDDDAAAAAKKKKKKKKKNNNNNNNNMMMMMMMMMMMMMMMMQQQQQQQQQAAAAAAAAAADDDDDDDDPPPPPPPRRRRRRRRRRRHHHHHHHHHHGGGGRRRRRRRRRRRYYYYYYYYYYYYLLLLLLLLTTTTTTTAAAAASSSSSSAAAAALLLLLLLLFFFFFFFFFFFRRRRRRRRRRRGGGGRRRRRRRRRRRMMMMMMMMSSSSSSTTTTTTTKKKKKKKKKEEEEEEEEEVVVVVVVDDDDDDDDEEEEEEEEEQQQQQQQQQMMMMMMMMLLLLLLLLNNNNNNNNVVVVVVVQQQQQQQQQNNNNNNNNKKKKKKKKKNNNNNNNNSSSSSSSSSSSSYYYYYYYYYYYYFFFFFFFFFFFIIIIIIIIEEEEEEEEEWWWWWWWWWWWWWWIIIIIIIIPPPPPPPNNNNNNNNNNNNNNNNIIIIIIIIKKKKKKKKKSSSSSSSSSSSSIIIIIIIICCCCCCDDDDDDDDIIIIIIIIPPPPPPPPPPPPPPKKKKKKKKKGGGGLLLLLLLLKKKKKKKKKMMMMMMMMSSSSSSVVVVVVVTTTTTTTFFFFFFFFFFFIIIIIIIIGGGGNNNNNNNNNNNNNNNNTTTTTTTCCCCCCIIIIIIIIQQQQQQQQQEEEEEEEEEMMMMMMMMFFFFFFFFFFFRRRRRRRRRRRRRRRRRRRRRRVVVVVVVGGGGEEEEEEEEEQQQQQQQQQFFFFFFFFFFFTTTTTTTGGGGMMMMMMMMFFFFFFFFFFFRRRRRRRRRRRRRRRRRRRRRRKKKKKKKKKRRRRRRRRRRRFFFFFFFFFFFLLLLLLLLHHHHHHHHHHWWWWWWWWWWWWWWYYYYYYYYYYYYTTTTTTTGGGGEEEEEEEEEGGGGMMMMMMMMDDDDDDDDEEEEEEEEEMMMMMMMMEEEEEEEEEFFFFFFFFFFFTTTTTTTEEEEEEEEEAAAAAEEEEEEEEESSSSSSNNNNNNNNMMMMMMMMNNNNNNNNDDDDDDDDLLLLLLLLVVVVVVVSSSSSSEEEEEEEEEYYYYYYYYYYYYQQQQQQQQQQQQQQQQQQYYYYYYYYYYYYQQQQQQQQQDDDDDDDDAAAAATTTTTTTVVVVVVVEEEEEEEEEEEEEEEEEEEEEEEEEEEGGGGEEEEEEEEEFFFFFFFFFFFDDDDDDDDEEEEEEEEEEEEEEEEEEEEEEEEEEEEEEEEEEEEAAAAAYYYYYYYYYYYYY

SEQ ID NO: 226 - protein, 901 aa, Lymnaea stagnalis
SSSSSSYYYYYYYYYYYYFFFFFFFFFFFVVVVVVVEEEEEEEEEWWWWWWWWWWWWWWIIIIIIIIPPPPPPPNNNNNNNNNNNNNNNNVVVVVVVKKKKKKKKKTTTTTTTAAAAAVVVVVVVCCCCCCDDDDDDDDIIIIIIIIPPPPPPPPPPPPPPRRRRRRRRRRRGGGGLLLLLLLLKKKKKKKKKMMMMMMMMSSSSSSAAAAATTTTTTTFFFFFFFFFFFIIIIIIIIGGGGNNNNNNNNSSSSSSTTTTTTTAAAAAIIIIIIIIQQQQQQQQQEEEEEEEEELLLLLLLLFFFFFFFFFFFKKKKKKKKKRRRRRRRRRRRIIIIIIIISSSSSSEEEEEEEEEQQQQQQQQQFFFFFFFFFFFTTTTTTTAAAAAMMMMMMMMFFFFFFFFFFFRRRRRRRRRRRRRRRRRRRRRRKKKKKKKKKAAAAAFFFFFFFFFFFLLLLLLLLHHHHHHHHHHWWWWWWWWWWWWWWYYYYYYYYYYYYTTTTTTTGGGGEEEEEEEEEGGGGMMMMMMMMDDDDDDDDEEEEEEEEEMMMMMMMMEEEEEEEEEFFFFFFFFFFFTTTTTTTEEEEEEEEEAAAAAEEEEEEEEESSSSSSNNNNNNNNMMMMMMMMNNNNNNNNDDDDDDDDLLLLLLLLVVVVVVVSSSSSSEEEEEEEEEYYYYYYYYYYYYQQQQQQQQQQQQQQQQQQYYYYYYYYYYYYQQQQQQQQQDDDDDDDDAAAAATTTTTTTAAAAAEEEEEEEEEDDDDDDDDEEEEEEEEEGGGGEEEEEEEEEFFFFFFFFFFFDDDDDDDDEEEEEEEEEEEEEEEEEEEEEEEEEEEAAAAAEEEEEEEEEGGGGEEEEEEEEEGGGGQQQQQQQQQEEEEEEEEEYYYYYYYYYYYYAAAAAA

SEQ ID NO: 227 - protein, 1422 aa, Lytechinus pictus
FFFFFFFFFFFAAAAAPPPPPPPLLLLLLLLTTTTTTTSSSSSSRRRRRRRRRRRGGGGSSSSSSQQQQQQQQQQQQQQQQQQYYYYYYYYYYYYRRRRRRRRRRRAAAAALLLLLLLLTTTTTTTVVVVVVVSSSSSSEEEEEEEEELLLLLLLLTTTTTTTQQQQQQQQQQQQQQQQQQMMMMMMMMFFFFFFFFFFFDDDDDDDDAAAAAKKKKKKKKKNNNNNNNNMMMMMMMMMMMMMMMMAAAAAAAAAACCCCCCDDDDDDDDPPPPPPPRRRRRRRRRRRHHHHHHHHHHGGGGRRRRRRRRRRRYYYYYYYYYYYYLLLLLLLLTTTTTTTVVVVVVVAAAAAAAAAAIIIIIIIIFFFFFFFFFFFRRRRRRRRRRRGGGGRRRRRRRRRRRMMMMMMMMSSSSSSMMMMMMMMKKKKKKKKKEEEEEEEEEVVVVVVVDDDDDDDDEEEEEEEEEQQQQQQQQQMMMMMMMMLLLLLLLLNNNNNNNNVVVVVVVQQQQQQQQQNNNNNNNNKKKKKKKKKNNNNNNNNSSSSSSSSSSSSYYYYYYYYYYYYFFFFFFFFFFFVVVVVVVEEEEEEEEEWWWWWWWWWWWWWWIIIIIIIIPPPPPPPNNNNNNNNNNNNNNNNVVVVVVVKKKKKKKKKTTTTTTTAAAAAVVVVVVVCCCCCCDDDDDDDDIIIIIIIIPPPPPPPPPPPPPPRRRRRRRRRRRGGGGLLLLLLLLKKKKKKKKKMMMMMMMMSSSSSSAAAAATTTTTTTFFFFFFFFFFFIIIIIIIIGGGGNNNNNNNNSSSSSSTTTTTTTAAAAAIIIIIIIIQQQQQQQQQEEEEEEEEELLLLLLLLFFFFFFFFFFFKKKKKKKKKRRRRRRRRRRRIIIIIIIISSSSSSEEEEEEEEEQQQQQQQQQFFFFFFFFFFFTTTTTTTAAAAAMMMMMMMMFFFFFFFFFFFRRRRRRRRRRRRRRRRRRRRRRKKKKKKKKKAAAAAFFFFFFFFFFFLLLLLLLLHHHHHHHHHHWWWWWWWWWWWWWWYYYYYYYYYYYYTTTTTTTGGGGEEEEEEEEEGGGGMMMMMMMMDDDDDDDDEEEEEEEEEMMMMMMMMEEEEEEEEEFFFFFFFFFFFTTTTTTTEEEEEEEEEAAAAAEEEEEEEEESSSSSSNNNNNNNNMMMMMMMMNNNNNNNNDDDDDDDDLLLLLLLLVVVVVVVSSSSSSEEEEEEEEEYYYYYYYYYYYYQQQQQQQQQQQQQQQQQQYYYYYYYYYYYYQQQQQQQQQDDDDDDDDAAAAATTTTTTTAAAAAEEEEEEEEEEEEEEEEEEEEEEEEEEEGGGGEEEEEEEEEFFFFFFFFFFFDDDDDDDDEEEEEEEEEEEEEEEEEEEEEEEEEEEGGGGDDDDDDDDEEEEEEEEEEEEEEEEEEAAAAAAAAAAA

SEQ ID NO: 228 - protein, 3491 aa, Mycosphaerella pini
MMMMMMMMRRRRRRRRRRREEEEEEEEEIIIIIIIIVVVVVVVHHHHHHHHHHLLLLLLLLQQQQQQQQQTTTTTTTGGGGQQQQQQQQQCCCCCCGGGGNNNNNNNNQQQQQQQQQIIIIIIIIGGGGAAAAAAAAAAFFFFFFFFFFFWWWWWWWWWWWWWWQQQQQQQQQTTTTTTTIIIIIIIISSSSSSGGGGEEEEEEEEEHHHHHHHHHHGGGGLLLLLLLLDDDDDDDDGGGGSSSSSSGGGGVVVVVVVYYYYYYYYYYYYNNNNNNNNGGGGTTTTTTTSSSSSSDDDDDDDDLLLLLLLLQQQQQQQQQLLLLLLLLEEEEEEEEERRRRRRRRRRRMMMMMMMMNNNNNNNNVVVVVVVYYYYYYYYYYYYFFFFFFFFFFFNNNNNNNNEEEEEEEEEAAAAASSSSSSGGGGNNNNNNNNKKKKKKKKKYYYYYYYYYYYYVVVVVVVPPPPPPPRRRRRRRRRRRAAAAAVVVVVVVLLLLLLLLVVVVVVVDDDDDDDDLLLLLLLLEEEEEEEEEPPPPPPPGGGGTTTTTTTMMMMMMMMDDDDDDDDAAAAAVVVVVVVRRRRRRRRRRRAAAAAGGGGPPPPPPPFFFFFFFFFFFGGGGQQQQQQQQQLLLLLLLLFFFFFFFFFFFRRRRRRRRRRRPPPPPPPDDDDDDDDNNNNNNNNFFFFFFFFFFFVVVVVVVFFFFFFFFFFFGGGGQQQQQQQQQSSSSSSGGGGAAAAAGGGGNNNNNNNNNNNNNNNNWWWWWWWWWWWWWWAAAAAKKKKKKKKKGGGGHHHHHHHHHHYYYYYYYYYYYYTTTTTTTEEEEEEEEEGGGGAAAAAEEEEEEEEELLLLLLLLVVVVVVVDDDDDDDDQQQQQQQQQVVVVVVVLLLLLLLLDDDDDDDDVVVVVVVVVVVVVVRRRRRRRRRRRRRRRRRRRRRREEEEEEEEEAAAAAEEEEEEEEEGGGGCCCCCCDDDDDDDDCCCCCCLLLLLLLLQQQQQQQQQGGGGFFFFFFFFFFFQQQQQQQQQIIIIIIIITTTTTTTHHHHHHHHHHSSSSSSLLLLLLLLGGGGGGGGGGGGTTTTTTTGGGGAAAAAGGGGMMMMMMMMGGGGTTTTTTTLLLLLLLLLLLLLLLLIIIIIIIISSSSSSKKKKKKKKKIIIIIIIIRRRRRRRRRRREEEEEEEEEEEEEEEEEEFFFFFFFFFFFPPPPPPPDDDDDDDDRRRRRRRRRRRMMMMMMMMMMMMMMMMAAAAATTTTTTTFFFFFFFFFFFSSSSSSVVVVVVVMMMMMMMMPPPPPPPSSSSSSPPPPPPPKKKKKKKKKVVVVVVVSSSSSSDDDDDDDDTTTTTTTVVVVVVVVVVVVVVEEEEEEEEEPPPPPPPYYYYYYYYYYYYNNNNNNNNAAAAATTTTTTTLLLLLLLLSSSSSSVVVVVVVHHHHHHHHHHQQQQQQQQQLLLLLLLLVVVVVVVEEEEEEEEENNNNNNNNSSSSSSDDDDDDDDEEEEEEEEETTTTTTTFFFFFFFFFFFCCCCCCIIIIIIIIDDDDDDDDNNNNNNNNEEEEEEEEEAAAAALLLLLLLLYYYYYYYYYYYYDDDDDDDDIIIIIIIICCCCCCMMMMMMMMRRRRRRRRRRRTTTTTTTLLLLLLLLKKKKKKKKKLLLLLLLLNNNNNNNNNNNNNNNNPPPPPPPSSSSSSYYYYYYYYYYYYGGGGDDDDDDDDLLLLLLLLNNNNNNNNHHHHHHHHHHLLLLLLLLVVVVVVVSSSSSSAAAAAVVVVVVVMMMMMMMMSSSSSSGGGGVVVVVVVTTTTTTTTTTTTTTCCCCCCLLLLLLLLRRRRRRRRRRRFFFFFFFFFFFPPPPPPPGGGGQQQQQQQQQLLLLLLLLNNNNNNNNSSSSSSDDDDDDDDLLLLLLLLRRRRRRRRRRRKKKKKKKKKLLLLLLLLAAAAAVVVVVVVNNNNNNNNMMMMMMMMVVVVVVVPPPPPPPFFFFFFFFFFFPPPPPPPRRRRRRRRRRRLLLLLLLLHHHHHHHHHHFFFFFFFFFFFFFFFFFFFFFFMMMMMMMMVVVVVVVGGGGFFFFFFFFFFFAAAAAPPPPPPPLLLLLLLLTTTTTTTSSSSSSRRRRRRRRRRRGGGGAAAAAHHHHHHHHHHSSSSSSFFFFFFFFFFFRRRRRRRRRRRAAAAAVVVVVVVTTTTTTTVVVVVVVPPPPPPPEEEEEEEEELLLLLLLLTTTTTTTQQQQQQQQQQQQQQQQQQIIIIIIIIFFFFFFFFFFFDDDDDDDDPPPPPPPKKKKKKKKKNNNNNNNNMMMMMMMMMMMMMMMMAAAAAAAAAASSSSSSDDDDDDDDFFFFFFFFFFFRRRRRRRRRRRNNNNNNNNGGGGRRRRRRRRRRRYYYYYYYYYYYYLLLLLLLLTTTTTTTCCCCCCSSSSSSAAAAAIIIIIIIIYYYYYYYYYYYYRRRRRRRRRRRGGGGKKKKKKKKKVVVVVVVSSSSSSMMMMMMMMKKKKKKKKKEEEEEEEEEVVVVVVVEEEEEEEEEDDDDDDDDQQQQQQQQQIIIIIIIIRRRRRRRRRRRNNNNNNNNVVVVVVVQQQQQQQQQNNNNNNNNKKKKKKKKKNNNNNNNNTTTTTTTAAAAAYYYYYYYYYYYYFFFFFFFFFFFVVVVVVVEEEEEEEEEWWWWWWWWWWWWWWIIIIIIIIPPPPPPPNNNNNNNNNNNNNNNNVVVVVVVQQQQQQQQQTTTTTTTAAAAALLLLLLLLCCCCCCSSSSSSIIIIIIIIPPPPPPPPPPPPPPRRRRRRRRRRRGGGGLLLLLLLLKKKKKKKKKMMMMMMMMSSSSSSSSSSSSTTTTTTTFFFFFFFFFFFVVVVVVVGGGGNNNNNNNNSSSSSSTTTTTTTSSSSSSIIIIIIIIQQQQQQQQQEEEEEEEEELLLLLLLLFFFFFFFFFFFKKKKKKKKKRRRRRRRRRRRVVVVVVVGGGGDDDDDDDDQQQQQQQQQFFFFFFFFFFFTTTTTTTAAAAAMMMMMMMMFFFFFFFFFFFRRRRRRRRRRRRRRRRRRRRRRKKKKKKKKKAAAAAFFFFFFFFFFFLLLLLLLLHHHHHHHHHHWWWWWWWWWWWWWWYYYYYYYYYYYYTTTTTTTGGGGEEEEEEEEEGGGGMMMMMMMMDDDDDDDDEEEEEEEEEMMMMMMMMEEEEEEEEEFFFFFFFFFFFTTTTTTTEEEEEEEEEAAAAAEEEEEEEEESSSSSSNNNNNNNNMMMMMMMMNNNNNNNNDDDDDDDDLLLLLLLLVVVVVVVSSSSSSEEEEEEEEEYYYYYYYYYYYYQQQQQQQQQQQQQQQQQQYYYYYYYYYYYYQQQQQQQQQEEEEEEEEEAAAAASSSSSSVVVVVVVSSSSSSEEEEEEEEEGGGGEEEEEEEEEEEEEEEEEEEEEEEEEEEYYYYYYYYYYYYDDDDDDDDEEEEEEEEEEEEEEEEEEAAAAAPPPPPPPLLLLLLLLEEEEEEEEEGGGGEEEEEEEEEEEEEEEEEEE

SEQ ID NO: 229 - protein, 3541 aa, Naegleria gruberi
MMMMMMMMRRRRRRRRRRREEEEEEEEEIIIIIIIIVVVVVVVHHHHHHHHHHIIIIIIIIQQQQQQQQQAAAAAGGGGQQQQQQQQQCCCCCCGGGGNNNNNNNNQQQQQQQQQIIIIIIIIGGGGAAAAAKKKKKKKKKFFFFFFFFFFFWWWWWWWWWWWWWWEEEEEEEEEVVVVVVVIIIIIIIISSSSSSDDDDDDDDEEEEEEEEEHHHHHHHHHHGGGGVVVVVVVDDDDDDDDPPPPPPPTTTTTTTGGGGAAAAAYYYYYYYYYYYYHHHHHHHHHHGGGGDDDDDDDDSSSSSSDDDDDDDDLLLLLLLLQQQQQQQQQLLLLLLLLEEEEEEEEERRRRRRRRRRRIIIIIIIINNNNNNNNVVVVVVVYYYYYYYYYYYYYYYYYYYYYYYYNNNNNNNNEEEEEEEEEAAAAATTTTTTTGGGGGGGGRRRRRRRRRRRYYYYYYYYYYYYVVVVVVVPPPPPPPRRRRRRRRRRRAAAAAIIIIIIIILLLLLLLLMMMMMMMMDDDDDDDDLLLLLLLLEEEEEEEEEPPPPPPPGGGGTTTTTTTMMMMMMMMDDDDDDDDSSSSSSVVVVVVVRRRRRRRRRRRAAAAAGGGGPPPPPPPYYYYYYYYYYYYGGGGQQQQQQQQQIIIIIIIIFFFFFFFFFFFRRRRRRRRRRRPPPPPPPDDDDDDDDNNNNNNNNFFFFFFFFFFFVVVVVVVFFFFFFFFFFFGGGGQQQQQQQQQTTTTTTTGGGGAAAAAGGGGNNNNNNNNNNNNNNNNWWWWWWWWWWWWWWAAAAAKKKKKKKKKGGGGHHHHHHHHHHYYYYYYYYYYYYTTTTTTTEEEEEEEEEGGGGAAAAAEEEEEEEEELLLLLLLLIIIIIIIIDDDDDDDDSSSSSSVVVVVVVLLLLLLLLDDDDDDDDVVVVVVVVVVVVVVRRRRRRRRRRRKKKKKKKKKEEEEEEEEEAAAAAEEEEEEEEESSSSSSCCCCCCDDDDDDDDCCCCCCLLLLLLLLQQQQQQQQQGGGGFFFFFFFFFFFQQQQQQQQQIIIIIIIIAAAAAHHHHHHHHHHSSSSSSLLLLLLLLGGGGGGGGGGGGTTTTTTTGGGGSSSSSSGGGGMMMMMMMMGGGGTTTTTTTLLLLLLLLLLLLLLLLIIIIIIIISSSSSSKKKKKKKKKIIIIIIIIRRRRRRRRRRREEEEEEEEEEEEEEEEEEYYYYYYYYYYYYPPPPPPPDDDDDDDDRRRRRRRRRRRMMMMMMMMMMMMMMMMMMMMMMMMTTTTTTTFFFFFFFFFFFSSSSSSVVVVVVVFFFFFFFFFFFPPPPPPPSSSSSSPPPPPPPKKKKKKKKKVVVVVVVSSSSSSDDDDDDDDTTTTTTTVVVVVVVVVVVVVVEEEEEEEEEPPPPPPPYYYYYYYYYYYYNNNNNNNNAAAAATTTTTTTLLLLLLLLSSSSSSVVVVVVVHHHHHHHHHHQQQQQQQQQLLLLLLLLVVVVVVVEEEEEEEEENNNNNNNNAAAAADDDDDDDDEEEEEEEEEVVVVVVVMMMMMMMMCCCCCCIIIIIIIIDDDDDDDDNNNNNNNNEEEEEEEEEAAAAALLLLLLLLYYYYYYYYYYYYDDDDDDDDIIIIIIIICCCCCCFFFFFFFFFFFRRRRRRRRRRRTTTTTTTLLLLLLLLKKKKKKKKKLLLLLLLLTTTTTTTTTTTTTTPPPPPPPTTTTTTTFFFFFFFFFFFGGGGDDDDDDDDLLLLLLLLNNNNNNNNHHHHHHHHHHLLLLLLLLVVVVVVVSSSSSSIIIIIIIIVVVVVVVMMMMMMMMSSSSSSGGGGVVVVVVVTTTTTTTCCCCCCCCCCCCLLLLLLLLRRRRRRRRRRRFFFFFFFFFFFPPPPPPPGGGGQQQQQQQQQLLLLLLLLNNNNNNNNSSSSSSDDDDDDDDLLLLLLLLRRRRRRRRRRRKKKKKKKKKLLLLLLLLAAAAAVVVVVVVNNNNNNNNLLLLLLLLIIIIIIIIPPPPPPPFFFFFFFFFFFPPPPPPPRRRRRRRRRRRLLLLLLLLHHHHHHHHHHFFFFFFFFFFFFFFFFFFFFFFLLLLLLLLIIIIIIIIGGGGFFFFFFFFFFFAAAAAPPPPPPPLLLLLLLLTTTTTTTSSSSSSRRRRRRRRRRRGGGGSSSSSSQQQQQQQQQQQQQQQQQQYYYYYYYYYYYYRRRRRRRRRRRAAAAALLLLLLLLTTTTTTTVVVVVVVPPPPPPPEEEEEEEEELLLLLLLLTTTTTTTQQQQQQQQQQQQQQQQQQMMMMMMMMFFFFFFFFFFFDDDDDDDDAAAAAKKKKKKKKKNNNNNNNNMMMMMMMMMMMMMMMMAAAAAAAAAASSSSSSDDDDDDDDPPPPPPPRRRRRRRRRRRHHHHHHHHHHGGGGRRRRRRRRRRRYYYYYYYYYYYYLLLLLLLLTTTTTTTAAAAASSSSSSAAAAAMMMMMMMMFFFFFFFFFFFRRRRRRRRRRRGGGGRRRRRRRRRRRMMMMMMMMSSSSSSTTTTTTTKKKKKKKKKEEEEEEEEEVVVVVVVDDDDDDDDEEEEEEEEEQQQQQQQQQMMMMMMMMLLLLLLLLNNNNNNNNVVVVVVVQQQQQQQQQNNNNNNNNKKKKKKKKKNNNNNNNNSSSSSSSSSSSSYYYYYYYYYYYYFFFFFFFFFFFVVVVVVVEEEEEEEEEWWWWWWWWWWWWWWIIIIIIIIPPPPPPPNNNNNNNNNNNNNNNNIIIIIIIIKKKKKKKKKSSSSSSSSSSSSVVVVVVVCCCCCCDDDDDDDDIIIIIIIIPPPPPPPPPPPPPPRRRRRRRRRRRGGGGLLLLLLLLKKKKKKKKKMMMMMMMMAAAAAAAAAATTTTTTTFFFFFFFFFFFIIIIIIIIGGGGNNNNNNNNSSSSSSTTTTTTTAAAAAIIIIIIIIQQQQQQQQQEEEEEEEEEMMMMMMMMFFFFFFFFFFFKKKKKKKKKRRRRRRRRRRRVVVVVVVSSSSSSEEEEEEEEEQQQQQQQQQFFFFFFFFFFFTTTTTTTAAAAAMMMMMMMMFFFFFFFFFFFRRRRRRRRRRRRRRRRRRRRRRKKKKKKKKKAAAAAFFFFFFFFFFFLLLLLLLLHHHHHHHHHHWWWWWWWWWWWWWWYYYYYYYYYYYYTTTTTTTGGGGEEEEEEEEEGGGGMMMMMMMMDDDDDDDDEEEEEEEEEMMMMMMMMEEEEEEEEEFFFFFFFFFFFTTTTTTTEEEEEEEEEAAAAAEEEEEEEEESSSSSSNNNNNNNNMMMMMMMMNNNNNNNNDDDDDDDDLLLLLLLLVVVVVVVSSSSSSEEEEEEEEEYYYYYYYYYYYYQQQQQQQQQQQQQQQQQQYYYYYYYYYYYYQQQQQQQQQDDDDDDDDAAAAATTTTTTTAAAAAEEEEEEEEEEEEEEEEEEEEEEEEEEEGGGGEEEEEEEEEFFFFFFFFFFFDDDDDDDDEEEEEEEEENNNNNNNNEEEEEEEEEGGGGAAAAAEEEEEEEEEGGGGEEEEEEEEEEEEEEEEEEQQQQQQQQQPPPPPPPAAAAADDDDDDDDYYYYYYYYYYYYY

SEQ ID NO: 230 - protein, 3496 aa, Neurospora crassa
MMMMMMMMRRRRRRRRRRREEEEEEEEEIIIIIIIIVVVVVVVHHHHHHHHHHLLLLLLLLQQQQQQQQQTTTTTTTGGGGQQQQQQQQQCCCCCCGGGGNNNNNNNNQQQQQQQQQIIIIIIIIGGGGAAAAAAAAAAFFFFFFFFFFFWWWWWWWWWWWWWWQQQQQQQQQTTTTTTTIIIIIIIISSSSSSGGGGEEEEEEEEEHHHHHHHHHHGGGGLLLLLLLLDDDDDDDDAAAAASSSSSSGGGGVVVVVVVYYYYYYYYYYYYNNNNNNNNGGGGTTTTTTTSSSSSSEEEEEEEEELLLLLLLLQQQQQQQQQLLLLLLLLEEEEEEEEERRRRRRRRRRRMMMMMMMMNNNNNNNNVVVVVVVYYYYYYYYYYYYFFFFFFFFFFFNNNNNNNNEEEEEEEEEAAAAASSSSSSGGGGNNNNNNNNKKKKKKKKKYYYYYYYYYYYYVVVVVVVPPPPPPPRRRRRRRRRRRAAAAAVVVVVVVLLLLLLLLVVVVVVVDDDDDDDDLLLLLLLLEEEEEEEEEPPPPPPPGGGGTTTTTTTMMMMMMMMDDDDDDDDAAAAAVVVVVVVRRRRRRRRRRRAAAAAGGGGPPPPPPPFFFFFFFFFFFGGGGQQQQQQQQQLLLLLLLLFFFFFFFFFFFRRRRRRRRRRRPPPPPPPDDDDDDDDNNNNNNNNFFFFFFFFFFFVVVVVVVFFFFFFFFFFFGGGGQQQQQQQQQSSSSSSGGGGAAAAAGGGGNNNNNNNNNNNNNNNNWWWWWWWWWWWWWWAAAAAKKKKKKKKKGGGGHHHHHHHHHHYYYYYYYYYYYYTTTTTTTEEEEEEEEEGGGGAAAAAEEEEEEEEELLLLLLLLVVVVVVVDDDDDDDDQQQQQQQQQVVVVVVVLLLLLLLLDDDDDDDDVVVVVVVVVVVVVVRRRRRRRRRRRRRRRRRRRRRREEEEEEEEEAAAAAEEEEEEEEEGGGGCCCCCCDDDDDDDDCCCCCCLLLLLLLLQQQQQQQQQGGGGFFFFFFFFFFFQQQQQQQQQIIIIIIIITTTTTTTHHHHHHHHHHSSSSSSLLLLLLLLGGGGGGGGGGGGTTTTTTTGGGGAAAAAGGGGMMMMMMMMGGGGTTTTTTTLLLLLLLLLLLLLLLLIIIIIIIISSSSSSKKKKKKKKKIIIIIIIIRRRRRRRRRRREEEEEEEEEEEEEEEEEEFFFFFFFFFFFPPPPPPPDDDDDDDDRRRRRRRRRRRMMMMMMMMMMMMMMMMAAAAATTTTTTTFFFFFFFFFFFSSSSSSVVVVVVVVVVVVVVPPPPPPPSSSSSSPPPPPPPKKKKKKKKKVVVVVVVSSSSSSDDDDDDDDTTTTTTTVVVVVVVVVVVVVVEEEEEEEEEPPPPPPPYYYYYYYYYYYYNNNNNNNNAAAAATTTTTTTLLLLLLLLSSSSSSVVVVVVVHHHHHHHHHHQQQQQQQQQLLLLLLLLVVVVVVVEEEEEEEEENNNNNNNNSSSSSSDDDDDDDDEEEEEEEEETTTTTTTFFFFFFFFFFFCCCCCCIIIIIIIIDDDDDDDDNNNNNNNNEEEEEEEEEAAAAALLLLLLLLYYYYYYYYYYYYDDDDDDDDIIIIIIIICCCCCCMMMMMMMMRRRRRRRRRRRTTTTTTTLLLLLLLLKKKKKKKKKLLLLLLLLSSSSSSNNNNNNNNPPPPPPPSSSSSSYYYYYYYYYYYYGGGGDDDDDDDDLLLLLLLLNNNNNNNNHHHHHHHHHHLLLLLLLLVVVVVVVSSSSSSAAAAAVVVVVVVMMMMMMMMSSSSSSGGGGVVVVVVVTTTTTTTVVVVVVVSSSSSSLLLLLLLLRRRRRRRRRRRFFFFFFFFFFFPPPPPPPGGGGQQQQQQQQQLLLLLLLLNNNNNNNNSSSSSSDDDDDDDDLLLLLLLLRRRRRRRRRRRKKKKKKKKKLLLLLLLLAAAAAVVVVVVVNNNNNNNNMMMMMMMMVVVVVVVPPPPPPPFFFFFFFFFFFPPPPPPPRRRRRRRRRRRLLLLLLLLHHHHHHHHHHFFFFFFFFFFFFFFFFFFFFFFMMMMMMMMVVVVVVVGGGGFFFFFFFFFFFAAAAAPPPPPPPLLLLLLLLTTTTTTTSSSSSSRRRRRRRRRRRGGGGAAAAAHHHHHHHHHHHHHHHHHHHHFFFFFFFFFFFRRRRRRRRRRRAAAAAVVVVVVVSSSSSSVVVVVVVPPPPPPPEEEEEEEEELLLLLLLLTTTTTTTQQQQQQQQQQQQQQQQQQMMMMMMMMFFFFFFFFFFFDDDDDDDDPPPPPPPKKKKKKKKKNNNNNNNNMMMMMMMMMMMMMMMMAAAAAAAAAASSSSSSDDDDDDDDFFFFFFFFFFFRRRRRRRRRRRNNNNNNNNGGGGRRRRRRRRRRRYYYYYYYYYYYYLLLLLLLLTTTTTTTCCCCCCSSSSSSAAAAAIIIIIIIIFFFFFFFFFFFRRRRRRRRRRRGGGGKKKKKKKKKVVVVVVVSSSSSSMMMMMMMMKKKKKKKKKEEEEEEEEEVVVVVVVEEEEEEEEEDDDDDDDDQQQQQQQQQMMMMMMMMRRRRRRRRRRRNNNNNNNNVVVVVVVQQQQQQQQQNNNNNNNNKKKKKKKKKNNNNNNNNSSSSSSSSSSSSYYYYYYYYYYYYFFFFFFFFFFFVVVVVVVEEEEEEEEEWWWWWWWWWWWWWWIIIIIIIIPPPPPPPNNNNNNNNNNNNNNNNVVVVVVVQQQQQQQQQTTTTTTTAAAAALLLLLLLLCCCCCCSSSSSSIIIIIIIIPPPPPPPPPPPPPPRRRRRRRRRRRGGGGLLLLLLLLKKKKKKKKKMMMMMMMMSSSSSSSSSSSSTTTTTTTFFFFFFFFFFFVVVVVVVGGGGNNNNNNNNSSSSSSTTTTTTTAAAAAIIIIIIIIQQQQQQQQQEEEEEEEEELLLLLLLLFFFFFFFFFFFKKKKKKKKKRRRRRRRRRRRIIIIIIIIGGGGEEEEEEEEEQQQQQQQQQFFFFFFFFFFFTTTTTTTAAAAAMMMMMMMMFFFFFFFFFFFKKKKKKKKKRRRRRRRRRRRKKKKKKKKKAAAAAFFFFFFFFFFFLLLLLLLLHHHHHHHHHHWWWWWWWWWWWWWWYYYYYYYYYYYYTTTTTTTGGGGEEEEEEEEEGGGGMMMMMMMMDDDDDDDDEEEEEEEEEMMMMMMMMEEEEEEEEEFFFFFFFFFFFTTTTTTTEEEEEEEEEAAAAAEEEEEEEEESSSSSSNNNNNNNNMMMMMMMMNNNNNNNNDDDDDDDDLLLLLLLLVVVVVVVSSSSSSEEEEEEEEEYYYYYYYYYYYYQQQQQQQQQQQQQQQQQQYYYYYYYYYYYYQQQQQQQQQDDDDDDDDAAAAAGGGGVVVVVVVDDDDDDDDEEEEEEEEEEEEEEEEEEEEEEEEEEEEEEEEEEEEEEEEEEEEEYYYYYYYYYYYYEEEEEEEEEEEEEEEEEEEEEEEEEEEAAAAAPPPPPPPLLLLLLLLEEEEEEEEEGGGGEEEEEEEEEEEEEEEEEEE

SEQ ID NO: 231 - protein, 3537 aa, Octopus dofleini
MMMMMMMMRRRRRRRRRRREEEEEEEEEIIIIIIIIVVVVVVVHHHHHHHHHHIIIIIIIIQQQQQQQQQAAAAAGGGGQQQQQQQQQCCCCCCGGGGNNNNNNNNQQQQQQQQQIIIIIIIIGGGGSSSSSSKKKKKKKKKFFFFFFFFFFFWWWWWWWWWWWWWWEEEEEEEEEVVVVVVVIIIIIIIISSSSSSEEEEEEEEEEEEEEEEEEHHHHHHHHHHGGGGIIIIIIIIDDDDDDDDPPPPPPPSSSSSSGGGGVVVVVVVYYYYYYYYYYYYQQQQQQQQQGGGGKKKKKKKKKLLLLLLLLSSSSSSTTTTTTTQQQQQQQQQLLLLLLLLEEEEEEEEERRRRRRRRRRRSSSSSSYYYYYYYYYYYYVVVVVVVYYYYYYYYYYYYFFFFFFFFFFFNNNNNNNNEEEEEEEEEAAAAASSSSSSSSSSSSGGGGKKKKKKKKKYYYYYYYYYYYYVVVVVVVPPPPPPPRRRRRRRRRRRAAAAAVVVVVVVLLLLLLLLLLLLLLLLDDDDDDDDLLLLLLLLEEEEEEEEEPPPPPPPGGGGTTTTTTTMMMMMMMMDDDDDDDDSSSSSSVVVVVVVRRRRRRRRRRRSSSSSSGGGGPPPPPPPYYYYYYYYYYYYGGGGSSSSSSLLLLLLLLFFFFFFFFFFFRRRRRRRRRRRPPPPPPPDDDDDDDDNNNNNNNNYYYYYYYYYYYYVVVVVVVFFFFFFFFFFFGGGGQQQQQQQQQSSSSSSGGGGAAAAAGGGGNNNNNNNNNNNNNNNNWWWWWWWWWWWWWWAAAAAKKKKKKKKKGGGGHHHHHHHHHHYYYYYYYYYYYYTTTTTTTEEEEEEEEEGGGGAAAAAEEEEEEEEELLLLLLLLVVVVVVVDDDDDDDDTTTTTTTVVVVVVVLLLLLLLLDDDDDDDDVVVVVVVIIIIIIIIRRRRRRRRRRRKKKKKKKKKEEEEEEEEECCCCCCEEEEEEEEEGGGGCCCCCCEEEEEEEEECCCCCCIIIIIIIIQQQQQQQQQGGGGFFFFFFFFFFFQQQQQQQQQMMMMMMMMTTTTTTTHHHHHHHHHHSSSSSSLLLLLLLLGGGGGGGGGGGGTTTTTTTGGGGAAAAAGGGGMMMMMMMMGGGGTTTTTTTLLLLLLLLLLLLLLLLIIIIIIIISSSSSSKKKKKKKKKYYYYYYYYYYYYRRRRRRRRRRREEEEEEEEEEEEEEEEEEYYYYYYYYYYYYPPPPPPPDDDDDDDDRRRRRRRRRRRIIIIIIIIMMMMMMMMTTTTTTTTTTTTTTFFFFFFFFFFFSSSSSSVVVVVVVMMMMMMMMPPPPPPPSSSSSSPPPPPPPKKKKKKKKKVVVVVVVSSSSSSDDDDDDDDTTTTTTTVVVVVVVVVVVVVVEEEEEEEEEPPPPPPPYYYYYYYYYYYYNNNNNNNNAAAAATTTTTTTLLLLLLLLSSSSSSIIIIIIIIHHHHHHHHHHQQQQQQQQQLLLLLLLLVVVVVVVEEEEEEEEENNNNNNNNTTTTTTTDDDDDDDDEEEEEEEEETTTTTTTFFFFFFFFFFFCCCCCCIIIIIIIIDDDDDDDDNNNNNNNNEEEEEEEEEAAAAALLLLLLLLYYYYYYYYYYYYDDDDDDDDIIIIIIIISSSSSSLLLLLLLLRRRRRRRRRRRTTTTTTTLLLLLLLLKKKKKKKKKLLLLLLLLPPPPPPPNNNNNNNNPPPPPPPTTTTTTTYYYYYYYYYYYYGGGGDDDDDDDDLLLLLLLLNNNNNNNNHHHHHHHHHHLLLLLLLLVVVVVVVSSSSSSAAAAATTTTTTTMMMMMMMMSSSSSSGGGGVVVVVVVTTTTTTTTTTTTTTCCCCCCLLLLLLLLRRRRRRRRRRRFFFFFFFFFFFPPPPPPPGGGGQQQQQQQQQLLLLLLLLNNNNNNNNAAAAADDDDDDDDLLLLLLLLRRRRRRRRRRRKKKKKKKKKLLLLLLLLAAAAAVVVVVVVNNNNNNNNMMMMMMMMVVVVVVVPPPPPPPFFFFFFFFFFFPPPPPPPRRRRRRRRRRRLLLLLLLLHHHHHHHHHHFFFFFFFFFFFFFFFFFFFFFFMMMMMMMMPPPPPPPGGGGFFFFFFFFFFFAAAAAPPPPPPPLLLLLLLLTTTTTTTSSSSSSRRRRRRRRRRRGGGGSSSSSSQQQQQQQQQDDDDDDDDYYYYYYYYYYYYRRRRRRRRRRRMMMMMMMMHHHHHHHHHHSSSSSSVVVVVVVSSSSSSDDDDDDDDLLLLLLLLTTTTTTTQQQQQQQQQQQQQQQQQQLLLLLLLLFFFFFFFFFFFDDDDDDDDAAAAAKKKKKKKKKNNNNNNNNMMMMMMMMMMMMMMMMTTTTTTTAAAAACCCCCCDDDDDDDDPPPPPPPRRRRRRRRRRRHHHHHHHHHHGGGGRRRRRRRRRRRYYYYYYYYYYYYLLLLLLLLTTTTTTTVVVVVVVAAAAAAAAAAVVVVVVVFFFFFFFFFFFRRRRRRRRRRRGGGGKKKKKKKKKMMMMMMMMSSSSSSMMMMMMMMKKKKKKKKKEEEEEEEEEVVVVVVVDDDDDDDDEEEEEEEEEQQQQQQQQQMMMMMMMMFFFFFFFFFFFSSSSSSIIIIIIIIQQQQQQQQQNNNNNNNNKKKKKKKKKMMMMMMMMSSSSSSPPPPPPPYYYYYYYYYYYYFFFFFFFFFFFVVVVVVVEEEEEEEEEWWWWWWWWWWWWWWIIIIIIIIPPPPPPPNNNNNNNNNNNNNNNNVVVVVVVKKKKKKKKKTTTTTTTAAAAAVVVVVVVCCCCCCDDDDDDDDIIIIIIIIPPPPPPPPPPPPPPTTTTTTTGGGGLLLLLLLLEEEEEEEEEMMMMMMMMSSSSSSAAAAATTTTTTTFFFFFFFFFFFIIIIIIIIGGGGNNNNNNNNSSSSSSTTTTTTTAAAAAIIIIIIIIQQQQQQQQQEEEEEEEEEIIIIIIIIFFFFFFFFFFFKKKKKKKKKRRRRRRRRRRRIIIIIIIISSSSSSEEEEEEEEEQQQQQQQQQFFFFFFFFFFFTTTTTTTAAAAAMMMMMMMMFFFFFFFFFFFRRRRRRRRRRRRRRRRRRRRRRKKKKKKKKKAAAAAFFFFFFFFFFFLLLLLLLLHHHHHHHHHHWWWWWWWWWWWWWWYYYYYYYYYYYYTTTTTTTGGGGEEEEEEEEEGGGGMMMMMMMMDDDDDDDDEEEEEEEEEMMMMMMMMEEEEEEEEEFFFFFFFFFFFTTTTTTTEEEEEEEEEAAAAAEEEEEEEEESSSSSSNNNNNNNNMMMMMMMMNNNNNNNNDDDDDDDDLLLLLLLLVVVVVVVSSSSSSEEEEEEEEEYYYYYYYYYYYYQQQQQQQQQQQQQQQQQQYYYYYYYYYYYYQQQQQQQQQEEEEEEEEEAAAAARRRRRRRRRRRSSSSSSTTTTTTTDDDDDDDDSSSSSSDDDDDDDDEEEEEEEEEYYYYYYYYYYYYDDDDDDDDNNNNNNNNEEEEEEEEEEEEEEEEEEYYYYYYYYYYYYYYYYYYYYYYYYNNNNNNNNQQQQQQQQQQQQQQQQQQEEEEEEEEEEEEEEEEEEE

SEQ ID NO: 232 - protein, 3506 aa, Onchocerca gibsoni
MMMMMMMMRRRRRRRRRRREEEEEEEEEIIIIIIIIVVVVVVVHHHHHHHHHHIIIIIIIIQQQQQQQQQAAAAAGGGGQQQQQQQQQCCCCCCGGGGNNNNNNNNQQQQQQQQQIIIIIIIIGGGGSSSSSSKKKKKKKKKFFFFFFFFFFFWWWWWWWWWWWWWWEEEEEEEEEVVVVVVVIIIIIIIISSSSSSDDDDDDDDEEEEEEEEEHHHHHHHHHHGGGGIIIIIIIIDDDDDDDDPPPPPPPLLLLLLLLGGGGQQQQQQQQQYYYYYYYYYYYYHHHHHHHHHHGGGGDDDDDDDDSSSSSSDDDDDDDDLLLLLLLLQQQQQQQQQLLLLLLLLEEEEEEEEERRRRRRRRRRRIIIIIIIINNNNNNNNVVVVVVVYYYYYYYYYYYYYYYYYYYYYYYYNNNNNNNNEEEEEEEEEVVVVVVVQQQQQQQQQKKKKKKKKKKKKKKKKKKRRRRRRRRRRRYYYYYYYYYYYYVVVVVVVPPPPPPPRRRRRRRRRRRAAAAAIIIIIIIILLLLLLLLVVVVVVVDDDDDDDDLLLLLLLLEEEEEEEEEPPPPPPPGGGGTTTTTTTMMMMMMMMDDDDDDDDSSSSSSVVVVVVVRRRRRRRRRRRAAAAAGGGGAAAAAFFFFFFFFFFFGGGGQQQQQQQQQLLLLLLLLFFFFFFFFFFFRRRRRRRRRRRPPPPPPPDDDDDDDDNNNNNNNNYYYYYYYYYYYYVVVVVVVFFFFFFFFFFFGGGGQQQQQQQQQSSSSSSGGGGAAAAAGGGGNNNNNNNNNNNNNNNNWWWWWWWWWWWWWWAAAAAKKKKKKKKKGGGGHHHHHHHHHHYYYYYYYYYYYYTTTTTTTEEEEEEEEEGGGGAAAAAEEEEEEEEELLLLLLLLVVVVVVVDDDDDDDDSSSSSSVVVVVVVLLLLLLLLDDDDDDDDVVVVVVVIIIIIIIIRRRRRRRRRRRKKKKKKKKKEEEEEEEEEAAAAAEEEEEEEEEAAAAACCCCCCDDDDDDDDCCCCCCLLLLLLLLQQQQQQQQQGGGGFFFFFFFFFFFQQQQQQQQQFFFFFFFFFFFTTTTTTTHHHHHHHHHHSSSSSSLLLLLLLLGGGGGGGGGGGGTTTTTTTGGGGSSSSSSGGGGMMMMMMMMGGGGTTTTTTTLLLLLLLLLLLLLLLLIIIIIIIISSSSSSKKKKKKKKKIIIIIIIIRRRRRRRRRRREEEEEEEEEEEEEEEEEEYYYYYYYYYYYYPPPPPPPDDDDDDDDRRRRRRRRRRRIIIIIIIIMMMMMMMMTTTTTTTTTTTTTTFFFFFFFFFFFSSSSSSVVVVVVVVVVVVVVPPPPPPPSSSSSSPPPPPPPKKKKKKKKKVVVVVVVSSSSSSDDDDDDDDTTTTTTTVVVVVVVVVVVVVVEEEEEEEEEPPPPPPPYYYYYYYYYYYYNNNNNNNNAAAAATTTTTTTLLLLLLLLSSSSSSVVVVVVVHHHHHHHHHHQQQQQQQQQLLLLLLLLVVVVVVVEEEEEEEEENNNNNNNNTTTTTTTDDDDDDDDEEEEEEEEETTTTTTTFFFFFFFFFFFCCCCCCIIIIIIIIDDDDDDDDNNNNNNNNEEEEEEEEEAAAAALLLLLLLLYYYYYYYYYYYYDDDDDDDDIIIIIIIICCCCCCFFFFFFFFFFFRRRRRRRRRRRTTTTTTTLLLLLLLLKKKKKKKKKLLLLLLLLTTTTTTTTTTTTTTPPPPPPPTTTTTTTYYYYYYYYYYYYGGGGDDDDDDDDLLLLLLLLNNNNNNNNHHHHHHHHHHLLLLLLLLVVVVVVVSSSSSSAAAAATTTTTTTMMMMMMMMSSSSSSGGGGVVVVVVVTTTTTTTTTTTTTTCCCCCCLLLLLLLLRRRRRRRRRRRFFFFFFFFFFFPPPPPPPGGGGQQQQQQQQQLLLLLLLLNNNNNNNNAAAAADDDDDDDDLLLLLLLLRRRRRRRRRRRKKKKKKKKKLLLLLLLLAAAAAVVVVVVVNNNNNNNNMMMMMMMMVVVVVVVPPPPPPPFFFFFFFFFFFPPPPPPPRRRRRRRRRRRLLLLLLLLHHHHHHHHHHFFFFFFFFFFFFFFFFFFFFFFMMMMMMMMPPPPPPPGGGGFFFFFFFFFFFAAAAAPPPPPPPLLLLLLLLTTTTTTTSSSSSSRRRRRRRRRRRSSSSSSNNNNNNNNQQQQQQQQQQQQQQQQQQYYYYYYYYYYYYRRRRRRRRRRRAAAAAVVVVVVVTTTTTTTVVVVVVVAAAAAEEEEEEEEELLLLLLLLTTTTTTTQQQQQQQQQQQQQQQQQQLLLLLLLLFFFFFFFFFFFDDDDDDDDAAAAAKKKKKKKKKNNNNNNNNMMMMMMMMMMMMMMMMAAAAAAAAAACCCCCCDDDDDDDDPPPPPPPRRRRRRRRRRRHHHHHHHHHHGGGGRRRRRRRRRRRYYYYYYYYYYYYLLLLLLLLTTTTTTTAAAAAAAAAAAAAAAIIIIIIIIFFFFFFFFFFFRRRRRRRRRRRGGGGRRRRRRRRRRRMMMMMMMMSSSSSSMMMMMMMMKKKKKKKKKDDDDDDDDVVVVVVVDDDDDDDDEEEEEEEEEQQQQQQQQQMMMMMMMMLLLLLLLLNNNNNNNNIIIIIIIIQQQQQQQQQNNNNNNNNKKKKKKKKKNNNNNNNNSSSSSSAAAAAYYYYYYYYYYYYFFFFFFFFFFFVVVVVVVDDDDDDDDWWWWWWWWWWWWWWIIIIIIIIPPPPPPPNNNNNNNNNNNNNNNNVVVVVVVKKKKKKKKKTTTTTTTAAAAAVVVVVVVCCCCCCDDDDDDDDIIIIIIIIPPPPPPPPPPPPPPRRRRRRRRRRRDDDDDDDDLLLLLLLLKKKKKKKKKMMMMMMMMAAAAAAAAAATTTTTTTFFFFFFFFFFFIIIIIIIIGGGGNNNNNNNNSSSSSSTTTTTTTAAAAAIIIIIIIIQQQQQQQQQEEEEEEEEELLLLLLLLFFFFFFFFFFFKKKKKKKKKRRRRRRRRRRRVVVVVVVSSSSSSEEEEEEEEEQQQQQQQQQFFFFFFFFFFFTTTTTTTAAAAAMMMMMMMMFFFFFFFFFFFRRRRRRRRRRRRRRRRRRRRRRKKKKKKKKKAAAAAFFFFFFFFFFFLLLLLLLLHHHHHHHHHHWWWWWWWWWWWWWWYYYYYYYYYYYYTTTTTTTGGGGEEEEEEEEEGGGGMMMMMMMMDDDDDDDDEEEEEEEEEMMMMMMMMEEEEEEEEEFFFFFFFFFFFTTTTTTTEEEEEEEEEAAAAAEEEEEEEEESSSSSSNNNNNNNNMMMMMMMMNNNNNNNNDDDDDDDDLLLLLLLLVVVVVVVSSSSSSEEEEEEEEEYYYYYYYYYYYYQQQQQQQQQQQQQQQQQQYYYYYYYYYYYYQQQQQQQQQDDDDDDDDAAAAASSSSSSAAAAADDDDDDDDDDDDDDDDEEEEEEEEELLLLLLLLNNNNNNNNEEEEEEEEETTTTTTTIIIIIIIIEEEEEEEEEQQQQQQQQQAAAAAEEEEEEEEETTTTTTTEEEEEEEEEE

SEQ ID NO: 233 - protein, 3510 aa, Paracentrotus lividus
MMMMMMMMRRRRRRRRRRREEEEEEEEEIIIIIIIIVVVVVVVHHHHHHHHHHMMMMMMMMQQQQQQQQQAAAAAGGGGQQQQQQQQQCCCCCCGGGGNNNNNNNNQQQQQQQQQIIIIIIIIGGGGAAAAAKKKKKKKKKFFFFFFFFFFFWWWWWWWWWWWWWWEEEEEEEEEVVVVVVVIIIIIIIISSSSSSDDDDDDDDEEEEEEEEEHHHHHHHHHHGGGGIIIIIIIIDDDDDDDDPPPPPPPTTTTTTTGGGGTTTTTTTYYYYYYYYYYYYHHHHHHHHHHGGGGDDDDDDDDSSSSSSDDDDDDDDLLLLLLLLQQQQQQQQQLLLLLLLLEEEEEEEEERRRRRRRRRRRIIIIIIIINNNNNNNNVVVVVVVYYYYYYYYYYYYYYYYYYYYYYYYNNNNNNNNEEEEEEEEEAAAAATTTTTTTGGGGGGGGKKKKKKKKKYYYYYYYYYYYYVVVVVVVPPPPPPPRRRRRRRRRRRAAAAAVVVVVVVLLLLLLLLVVVVVVVDDDDDDDDLLLLLLLLEEEEEEEEEPPPPPPPGGGGTTTTTTTMMMMMMMMDDDDDDDDSSSSSSVVVVVVVRRRRRRRRRRRSSSSSSGGGGPPPPPPPFFFFFFFFFFFGGGGQQQQQQQQQIIIIIIIIFFFFFFFFFFFRRRRRRRRRRRPPPPPPPDDDDDDDDNNNNNNNNFFFFFFFFFFFVVVVVVVFFFFFFFFFFFGGGGQQQQQQQQQSSSSSSGGGGAAAAAGGGGNNNNNNNNNNNNNNNNWWWWWWWWWWWWWWAAAAAKKKKKKKKKGGGGHHHHHHHHHHYYYYYYYYYYYYTTTTTTTEEEEEEEEEGGGGAAAAAEEEEEEEEELLLLLLLLVVVVVVVDDDDDDDDSSSSSSVVVVVVVLLLLLLLLDDDDDDDDVVVVVVVVVVVVVVRRRRRRRRRRRKKKKKKKKKEEEEEEEEEAAAAAEEEEEEEEESSSSSSCCCCCCDDDDDDDDCCCCCCLLLLLLLLQQQQQQQQQGGGGFFFFFFFFFFFQQQQQQQQQLLLLLLLLTTTTTTTHHHHHHHHHHSSSSSSLLLLLLLLGGGGGGGGGGGGTTTTTTTGGGGSSSSSSGGGGMMMMMMMMGGGGTTTTTTTLLLLLLLLLLLLLLLLIIIIIIIISSSSSSKKKKKKKKKIIIIIIIIRRRRRRRRRRREEEEEEEEEEEEEEEEEEYYYYYYYYYYYYPPPPPPPDDDDDDDDRRRRRRRRRRRIIIIIIIIMMMMMMMMNNNNNNNNTTTTTTTFFFFFFFFFFFSSSSSSVVVVVVVVVVVVVVPPPPPPPSSSSSSPPPPPPPKKKKKKKKKVVVVVVVSSSSSSDDDDDDDDTTTTTTTVVVVVVVVVVVVVVEEEEEEEEEPPPPPPPYYYYYYYYYYYYNNNNNNNNAAAAATTTTTTTLLLLLLLLSSSSSSVVVVVVVHHHHHHHHHHQQQQQQQQQLLLLLLLLVVVVVVVEEEEEEEEENNNNNNNNTTTTTTTDDDDDDDDEEEEEEEEETTTTTTTYYYYYYYYYYYYCCCCCCIIIIIIIIDDDDDDDDNNNNNNNNEEEEEEEEEAAAAALLLLLLLLYYYYYYYYYYYYDDDDDDDDIIIIIIIICCCCCCFFFFFFFFFFFRRRRRRRRRRRTTTTTTTLLLLLLLLKKKKKKKKKLLLLLLLLTTTTTTTTTTTTTTPPPPPPPTTTTTTTYYYYYYYYYYYYGGGGDDDDDDDDLLLLLLLLNNNNNNNNHHHHHHHHHHLLLLLLLLVVVVVVVSSSSSSAAAAATTTTTTTMMMMMMMMSSSSSSGGGGVVVVVVVTTTTTTTTTTTTTTCCCCCCLLLLLLLLRRRRRRRRRRRFFFFFFFFFFFPPPPPPPGGGGQQQQQQQQQLLLLLLLLNNNNNNNNAAAAADDDDDDDDLLLLLLLLRRRRRRRRRRRKKKKKKKKKLLLLLLLLAAAAAVVVVVVVNNNNNNNNMMMMMMMMVVVVVVVPPPPPPPFFFFFFFFFFFPPPPPPPRRRRRRRRRRRLLLLLLLLHHHHHHHHHHFFFFFFFFFFFFFFFFFFFFFFMMMMMMMMPPPPPPPGGGGFFFFFFFFFFFAAAAAPPPPPPPLLLLLLLLTTTTTTTSSSSSSRRRRRRRRRRRGGGGSSSSSSQQQQQQQQQQQQQQQQQQYYYYYYYYYYYYRRRRRRRRRRRAAAAALLLLLLLLTTTTTTTVVVVVVVPPPPPPPEEEEEEEEELLLLLLLLTTTTTTTQQQQQQQQQQQQQQQQQQMMMMMMMMFFFFFFFFFFFDDDDDDDDAAAAAKKKKKKKKKNNNNNNNNMMMMMMMMMMMMMMMMAAAAAAAAAACCCCCCDDDDDDDDPPPPPPPRRRRRRRRRRRHHHHHHHHHHGGGGRRRRRRRRRRRYYYYYYYYYYYYLLLLLLLLTTTTTTTVVVVVVVAAAAAAAAAAIIIIIIIIFFFFFFFFFFFRRRRRRRRRRRGGGGRRRRRRRRRRRMMMMMMMMSSSSSSMMMMMMMMKKKKKKKKKEEEEEEEEEVVVVVVVDDDDDDDDEEEEEEEEEQQQQQQQQQMMMMMMMMLLLLLLLLNNNNNNNNVVVVVVVQQQQQQQQQNNNNNNNNKKKKKKKKKNNNNNNNNSSSSSSSSSSSSYYYYYYYYYYYYFFFFFFFFFFFVVVVVVVEEEEEEEEEWWWWWWWWWWWWWWIIIIIIIIPPPPPPPNNNNNNNNNNNNNNNNVVVVVVVKKKKKKKKKTTTTTTTAAAAAVVVVVVVCCCCCCDDDDDDDDIIIIIIIIPPPPPPPPPPPPPPRRRRRRRRRRRGGGGLLLLLLLLKKKKKKKKKMMMMMMMMSSSSSSAAAAATTTTTTTFFFFFFFFFFFIIIIIIIIGGGGNNNNNNNNSSSSSSTTTTTTTAAAAAIIIIIIIIQQQQQQQQQEEEEEEEEELLLLLLLLFFFFFFFFFFFKKKKKKKKKRRRRRRRRRRRIIIIIIIISSSSSSEEEEEEEEEQQQQQQQQQFFFFFFFFFFFTTTTTTTAAAAAMMMMMMMMFFFFFFFFFFFRRRRRRRRRRRRRRRRRRRRRRKKKKKKKKKAAAAAFFFFFFFFFFFLLLLLLLLHHHHHHHHHHWWWWWWWWWWWWWWYYYYYYYYYYYYTTTTTTTGGGGEEEEEEEEEGGGGMMMMMMMMDDDDDDDDEEEEEEEEEMMMMMMMMEEEEEEEEEFFFFFFFFFFFTTTTTTTEEEEEEEEEAAAAAEEEEEEEEESSSSSSNNNNNNNNMMMMMMMMNNNNNNNNDDDDDDDDLLLLLLLLVVVVVVVSSSSSSEEEEEEEEEYYYYYYYYYYYYQQQQQQQQQQQQQQQQQQYYYYYYYYYYYYQQQQQQQQQDDDDDDDDAAAAATTTTTTTAAAAAEEEEEEEEEEEEEEEEEEEEEEEEEEEGGGGEEEEEEEEEFFFFFFFFFFFDDDDDDDDEEEEEEEEEEEEEEEEEEEEEEEEEEEEEEEEEEEEGGGGDDDDDDDDEEEEEEEEEEEEEEEEEEAAAAAAAAAAA

SEQ ID NO: 234 - protein, 3498 aa, Penicillium digitatum
MMMMMMMMRRRRRRRRRRREEEEEEEEEIIIIIIIIVVVVVVVHHHHHHHHHHLLLLLLLLQQQQQQQQQTTTTTTTGGGGQQQQQQQQQCCCCCCGGGGNNNNNNNNQQQQQQQQQIIIIIIIIGGGGAAAAAAAAAAFFFFFFFFFFFWWWWWWWWWWWWWWQQQQQQQQQTTTTTTTIIIIIIIISSSSSSGGGGEEEEEEEEEHHHHHHHHHHGGGGLLLLLLLLDDDDDDDDGGGGDDDDDDDDGGGGQQQQQQQQQYYYYYYYYYYYYNNNNNNNNGGGGTTTTTTTSSSSSSDDDDDDDDLLLLLLLLQQQQQQQQQLLLLLLLLEEEEEEEEERRRRRRRRRRRMMMMMMMMNNNNNNNNVVVVVVVYYYYYYYYYYYYFFFFFFFFFFFNNNNNNNNHHHHHHHHHHAAAAASSSSSSGGGGDDDDDDDDKKKKKKKKKYYYYYYYYYYYYVVVVVVVPPPPPPPRRRRRRRRRRRAAAAAVVVVVVVLLLLLLLLVVVVVVVDDDDDDDDLLLLLLLLEEEEEEEEEPPPPPPPGGGGTTTTTTTMMMMMMMMDDDDDDDDAAAAAVVVVVVVRRRRRRRRRRRSSSSSSGGGGPPPPPPPFFFFFFFFFFFGGGGKKKKKKKKKLLLLLLLLFFFFFFFFFFFRRRRRRRRRRRPPPPPPPDDDDDDDDNNNNNNNNFFFFFFFFFFFVVVVVVVFFFFFFFFFFFGGGGQQQQQQQQQSSSSSSGGGGAAAAAGGGGNNNNNNNNNNNNNNNNWWWWWWWWWWWWWWAAAAAKKKKKKKKKGGGGHHHHHHHHHHYYYYYYYYYYYYTTTTTTTEEEEEEEEEGGGGAAAAAEEEEEEEEELLLLLLLLVVVVVVVDDDDDDDDQQQQQQQQQVVVVVVVLLLLLLLLDDDDDDDDVVVVVVVVVVVVVVRRRRRRRRRRRRRRRRRRRRRREEEEEEEEEAAAAAEEEEEEEEEGGGGCCCCCCDDDDDDDDCCCCCCLLLLLLLLQQQQQQQQQGGGGFFFFFFFFFFFQQQQQQQQQIIIIIIIITTTTTTTHHHHHHHHHHSSSSSSLLLLLLLLGGGGGGGGGGGGTTTTTTTGGGGAAAAAGGGGMMMMMMMMGGGGTTTTTTTLLLLLLLLLLLLLLLLIIIIIIIISSSSSSKKKKKKKKKIIIIIIIIRRRRRRRRRRREEEEEEEEEEEEEEEEEEFFFFFFFFFFFPPPPPPPDDDDDDDDRRRRRRRRRRRMMMMMMMMMMMMMMMMAAAAATTTTTTTFFFFFFFFFFFSSSSSSVVVVVVVVVVVVVVPPPPPPPSSSSSSPPPPPPPKKKKKKKKKVVVVVVVSSSSSSDDDDDDDDTTTTTTTVVVVVVVVVVVVVVEEEEEEEEEPPPPPPPYYYYYYYYYYYYNNNNNNNNAAAAATTTTTTTLLLLLLLLSSSSSSVVVVVVVHHHHHHHHHHQQQQQQQQQLLLLLLLLVVVVVVVEEEEEEEEEHHHHHHHHHHSSSSSSDDDDDDDDEEEEEEEEETTTTTTTFFFFFFFFFFFCCCCCCIIIIIIIIDDDDDDDDNNNNNNNNEEEEEEEEEAAAAALLLLLLLLYYYYYYYYYYYYDDDDDDDDIIIIIIIICCCCCCMMMMMMMMRRRRRRRRRRRTTTTTTTLLLLLLLLKKKKKKKKKLLLLLLLLSSSSSSQQQQQQQQQPPPPPPPSSSSSSYYYYYYYYYYYYGGGGDDDDDDDDLLLLLLLLNNNNNNNNHHHHHHHHHHLLLLLLLLVVVVVVVSSSSSSAAAAAVVVVVVVMMMMMMMMSSSSSSGGGGVVVVVVVTTTTTTTTTTTTTTSSSSSSLLLLLLLLRRRRRRRRRRRFFFFFFFFFFFPPPPPPPGGGGQQQQQQQQQLLLLLLLLNNNNNNNNSSSSSSDDDDDDDDLLLLLLLLRRRRRRRRRRRKKKKKKKKKLLLLLLLLAAAAAVVVVVVVNNNNNNNNMMMMMMMMVVVVVVVPPPPPPPFFFFFFFFFFFPPPPPPPRRRRRRRRRRRLLLLLLLLHHHHHHHHHHFFFFFFFFFFFFFFFFFFFFFFMMMMMMMMVVVVVVVGGGGFFFFFFFFFFFAAAAAPPPPPPPLLLLLLLLTTTTTTTSSSSSSRRRRRRRRRRRGGGGGGGGSSSSSSSSSSSSYYYYYYYYYYYYRRRRRRRRRRRQQQQQQQQQVVVVVVVSSSSSSVVVVVVVPPPPPPPEEEEEEEEELLLLLLLLTTTTTTTQQQQQQQQQQQQQQQQQQMMMMMMMMFFFFFFFFFFFDDDDDDDDPPPPPPPKKKKKKKKKNNNNNNNNMMMMMMMMMMMMMMMMAAAAAAAAAASSSSSSDDDDDDDDFFFFFFFFFFFRRRRRRRRRRRNNNNNNNNGGGGRRRRRRRRRRRYYYYYYYYYYYYLLLLLLLLTTTTTTTCCCCCCSSSSSSAAAAALLLLLLLLFFFFFFFFFFFRRRRRRRRRRRGGGGKKKKKKKKKIIIIIIIISSSSSSMMMMMMMMKKKKKKKKKEEEEEEEEEVVVVVVVEEEEEEEEEDDDDDDDDQQQQQQQQQMMMMMMMMRRRRRRRRRRRNNNNNNNNIIIIIIIIQQQQQQQQQNNNNNNNNKKKKKKKKKNNNNNNNNQQQQQQQQQSSSSSSYYYYYYYYYYYYFFFFFFFFFFFVVVVVVVEEEEEEEEEWWWWWWWWWWWWWWIIIIIIIIPPPPPPPNNNNNNNNNNNNNNNNVVVVVVVQQQQQQQQQTTTTTTTAAAAALLLLLLLLCCCCCCSSSSSSVVVVVVVPPPPPPPPPPPPPPRRRRRRRRRRRGGGGLLLLLLLLKKKKKKKKKMMMMMMMMSSSSSSSSSSSSTTTTTTTFFFFFFFFFFFVVVVVVVGGGGNNNNNNNNSSSSSSTTTTTTTSSSSSSIIIIIIIIQQQQQQQQQEEEEEEEEELLLLLLLLFFFFFFFFFFFKKKKKKKKKRRRRRRRRRRRVVVVVVVGGGGDDDDDDDDQQQQQQQQQFFFFFFFFFFFAAAAAAAAAAMMMMMMMMFFFFFFFFFFFRRRRRRRRRRRRRRRRRRRRRRKKKKKKKKKAAAAAFFFFFFFFFFFLLLLLLLLHHHHHHHHHHWWWWWWWWWWWWWWYYYYYYYYYYYYTTTTTTTGGGGEEEEEEEEEGGGGMMMMMMMMDDDDDDDDEEEEEEEEEMMMMMMMMEEEEEEEEEFFFFFFFFFFFTTTTTTTEEEEEEEEEAAAAAEEEEEEEEESSSSSSNNNNNNNNMMMMMMMMNNNNNNNNDDDDDDDDLLLLLLLLVVVVVVVSSSSSSEEEEEEEEEYYYYYYYYYYYYQQQQQQQQQQQQQQQQQQYYYYYYYYYYYYQQQQQQQQQEEEEEEEEEAAAAASSSSSSVVVVVVVSSSSSSEEEEEEEEEGGGGEEEEEEEEEEEEEEEEEEEEEEEEEEEYYYYYYYYYYYYLLLLLLLLAAAAAEEEEEEEEEDDDDDDDDIIIIIIIIVVVVVVVDDDDDDDDEEEEEEEEEEEEEEEEEEVVVVVVVV

SEQ ID NO: 235 - protein, 3494 aa, Pestalotiopsis microspora
MMMMMMMMRRRRRRRRRRREEEEEEEEEIIIIIIIIVVVVVVVHHHHHHHHHHLLLLLLLLQQQQQQQQQTTTTTTTGGGGQQQQQQQQQCCCCCCGGGGNNNNNNNNQQQQQQQQQIIIIIIIIGGGGAAAAAAAAAAFFFFFFFFFFFWWWWWWWWWWWWWWQQQQQQQQQTTTTTTTIIIIIIIISSSSSSGGGGEEEEEEEEEHHHHHHHHHHGGGGLLLLLLLLDDDDDDDDSSSSSSNNNNNNNNGGGGVVVVVVVYYYYYYYYYYYYNNNNNNNNGGGGTTTTTTTSSSSSSEEEEEEEEELLLLLLLLQQQQQQQQQLLLLLLLLEEEEEEEEERRRRRRRRRRRMMMMMMMMSSSSSSVVVVVVVYYYYYYYYYYYYFFFFFFFFFFFNNNNNNNNEEEEEEEEEAAAAASSSSSSGGGGNNNNNNNNKKKKKKKKKYYYYYYYYYYYYVVVVVVVPPPPPPPRRRRRRRRRRRAAAAAVVVVVVVLLLLLLLLVVVVVVVDDDDDDDDLLLLLLLLEEEEEEEEEPPPPPPPGGGGTTTTTTTMMMMMMMMDDDDDDDDAAAAAVVVVVVVRRRRRRRRRRRAAAAAGGGGPPPPPPPFFFFFFFFFFFGGGGQQQQQQQQQLLLLLLLLFFFFFFFFFFFRRRRRRRRRRRPPPPPPPDDDDDDDDNNNNNNNNFFFFFFFFFFFVVVVVVVFFFFFFFFFFFGGGGQQQQQQQQQSSSSSSGGGGAAAAAGGGGNNNNNNNNNNNNNNNNWWWWWWWWWWWWWWAAAAAKKKKKKKKKGGGGHHHHHHHHHHYYYYYYYYYYYYTTTTTTTEEEEEEEEEGGGGAAAAAEEEEEEEEELLLLLLLLVVVVVVVDDDDDDDDQQQQQQQQQVVVVVVVLLLLLLLLDDDDDDDDVVVVVVVVVVVVVVRRRRRRRRRRRRRRRRRRRRRREEEEEEEEEAAAAAEEEEEEEEEAAAAACCCCCCDDDDDDDDCCCCCCLLLLLLLLQQQQQQQQQGGGGFFFFFFFFFFFQQQQQQQQQIIIIIIIITTTTTTTHHHHHHHHHHSSSSSSLLLLLLLLGGGGGGGGGGGGTTTTTTTGGGGAAAAAGGGGMMMMMMMMGGGGTTTTTTTLLLLLLLLLLLLLLLLIIIIIIIISSSSSSKKKKKKKKKIIIIIIIIRRRRRRRRRRREEEEEEEEEEEEEEEEEEFFFFFFFFFFFPPPPPPPDDDDDDDDRRRRRRRRRRRMMMMMMMMMMMMMMMMAAAAATTTTTTTFFFFFFFFFFFSSSSSSVVVVVVVVVVVVVVPPPPPPPSSSSSSPPPPPPPKKKKKKKKKVVVVVVVSSSSSSDDDDDDDDTTTTTTTVVVVVVVVVVVVVVEEEEEEEEEPPPPPPPYYYYYYYYYYYYNNNNNNNNAAAAATTTTTTTLLLLLLLLSSSSSSVVVVVVVHHHHHHHHHHQQQQQQQQQLLLLLLLLVVVVVVVEEEEEEEEENNNNNNNNSSSSSSDDDDDDDDEEEEEEEEETTTTTTTFFFFFFFFFFFCCCCCCIIIIIIIIDDDDDDDDNNNNNNNNEEEEEEEEEAAAAALLLLLLLLYYYYYYYYYYYYDDDDDDDDIIIIIIIICCCCCCMMMMMMMMRRRRRRRRRRRTTTTTTTLLLLLLLLKKKKKKKKKLLLLLLLLSSSSSSNNNNNNNNPPPPPPPSSSSSSYYYYYYYYYYYYGGGGDDDDDDDDLLLLLLLLNNNNNNNNHHHHHHHHHHLLLLLLLLVVVVVVVSSSSSSAAAAAVVVVVVVMMMMMMMMSSSSSSGGGGVVVVVVVTTTTTTTTTTTTTTCCCCCCLLLLLLLLRRRRRRRRRRRFFFFFFFFFFFPPPPPPPGGGGQQQQQQQQQLLLLLLLLNNNNNNNNSSSSSSDDDDDDDDLLLLLLLLRRRRRRRRRRRKKKKKKKKKLLLLLLLLAAAAAVVVVVVVNNNNNNNNMMMMMMMMVVVVVVVPPPPPPPFFFFFFFFFFFPPPPPPPRRRRRRRRRRRLLLLLLLLHHHHHHHHHHFFFFFFFFFFFFFFFFFFFFFFMMMMMMMMVVVVVVVGGGGFFFFFFFFFFFAAAAAPPPPPPPLLLLLLLLTTTTTTTSSSSSSRRRRRRRRRRRGGGGAAAAAHHHHHHHHHHSSSSSSFFFFFFFFFFFRRRRRRRRRRRAAAAAVVVVVVVTTTTTTTVVVVVVVPPPPPPPEEEEEEEEELLLLLLLLTTTTTTTQQQQQQQQQQQQQQQQQQMMMMMMMMFFFFFFFFFFFDDDDDDDDPPPPPPPKKKKKKKKKNNNNNNNNMMMMMMMMMMMMMMMMAAAAAAAAAASSSSSSDDDDDDDDFFFFFFFFFFFRRRRRRRRRRRNNNNNNNNGGGGRRRRRRRRRRRYYYYYYYYYYYYLLLLLLLLTTTTTTTCCCCCCSSSSSSAAAAAIIIIIIIIFFFFFFFFFFFRRRRRRRRRRRGGGGKKKKKKKKKVVVVVVVSSSSSSMMMMMMMMKKKKKKKKKEEEEEEEEEVVVVVVVEEEEEEEEEDDDDDDDDQQQQQQQQQMMMMMMMMRRRRRRRRRRRNNNNNNNNVVVVVVVQQQQQQQQQNNNNNNNNKKKKKKKKKNNNNNNNNSSSSSSSSSSSSYYYYYYYYYYYYFFFFFFFFFFFVVVVVVVEEEEEEEEEWWWWWWWWWWWWWWIIIIIIIIPPPPPPPNNNNNNNNNNNNNNNNVVVVVVVQQQQQQQQQTTTTTTTAAAAALLLLLLLLCCCCCCSSSSSSIIIIIIIIPPPPPPPPPPPPPPRRRRRRRRRRRGGGGLLLLLLLLKKKKKKKKKMMMMMMMMSSSSSSSSSSSSTTTTTTTFFFFFFFFFFFVVVVVVVGGGGNNNNNNNNSSSSSSTTTTTTTAAAAAIIIIIIIIQQQQQQQQQEEEEEEEEELLLLLLLLFFFFFFFFFFFKKKKKKKKKRRRRRRRRRRRIIIIIIIIGGGGEEEEEEEEEQQQQQQQQQFFFFFFFFFFFTTTTTTTAAAAAMMMMMMMMFFFFFFFFFFFRRRRRRRRRRRRRRRRRRRRRRKKKKKKKKKAAAAAFFFFFFFFFFFLLLLLLLLHHHHHHHHHHWWWWWWWWWWWWWWYYYYYYYYYYYYTTTTTTTGGGGEEEEEEEEEGGGGMMMMMMMMDDDDDDDDEEEEEEEEEMMMMMMMMEEEEEEEEEFFFFFFFFFFFTTTTTTTEEEEEEEEEAAAAAEEEEEEEEESSSSSSNNNNNNNNMMMMMMMMNNNNNNNNDDDDDDDDLLLLLLLLVVVVVVVSSSSSSEEEEEEEEEYYYYYYYYYYYYQQQQQQQQQQQQQQQQQQYYYYYYYYYYYYQQQQQQQQQDDDDDDDDAAAAAGGGGVVVVVVVDDDDDDDDEEEEEEEEEEEEEEEEEEEEEEEEEEEEEEEEEEEEEEEEEEEEEYYYYYYYYYYYYEEEEEEEEEEEEEEEEEEEEEEEEEEEPPPPPPPLLLLLLLLPPPPPPPEEEEEEEEEDDDDDDDDEEEEEEEEEE

SEQ ID NO: 236 - protein, 3502 aa, Phaeosphaeria nodorum
MMMMMMMMRRRRRRRRRRREEEEEEEEEIIIIIIIIVVVVVVVYYYYYYYYYYYYLLLLLLLLQQQQQQQQQTTTTTTTGGGGQQQQQQQQQCCCCCCGGGGNNNNNNNNQQQQQQQQQIIIIIIIIGGGGAAAAAAAAAAFFFFFFFFFFFWWWWWWWWWWWWWWQQQQQQQQQTTTTTTTIIIIIIIISSSSSSGGGGEEEEEEEEEHHHHHHHHHHGGGGLLLLLLLLDDDDDDDDGGGGSSSSSSGGGGVVVVVVVYYYYYYYYYYYYNNNNNNNNGGGGTTTTTTTSSSSSSDDDDDDDDLLLLLLLLQQQQQQQQQLLLLLLLLEEEEEEEEERRRRRRRRRRRMMMMMMMMNNNNNNNNVVVVVVVYYYYYYYYYYYYFFFFFFFFFFFNNNNNNNNEEEEEEEEEAAAAASSSSSSGGGGNNNNNNNNKKKKKKKKKFFFFFFFFFFFVVVVVVVPPPPPPPRRRRRRRRRRRAAAAAVVVVVVVLLLLLLLLVVVVVVVDDDDDDDDLLLLLLLLEEEEEEEEEPPPPPPPGGGGTTTTTTTMMMMMMMMDDDDDDDDAAAAAVVVVVVVRRRRRRRRRRRAAAAAGGGGPPPPPPPFFFFFFFFFFFGGGGQQQQQQQQQLLLLLLLLFFFFFFFFFFFRRRRRRRRRRRPPPPPPPDDDDDDDDNNNNNNNNFFFFFFFFFFFVVVVVVVFFFFFFFFFFFGGGGQQQQQQQQQSSSSSSGGGGAAAAAGGGGNNNNNNNNNNNNNNNNWWWWWWWWWWWWWWAAAAAKKKKKKKKKGGGGHHHHHHHHHHYYYYYYYYYYYYTTTTTTTEEEEEEEEEGGGGAAAAAEEEEEEEEELLLLLLLLVVVVVVVDDDDDDDDQQQQQQQQQVVVVVVVLLLLLLLLDDDDDDDDVVVVVVVVVVVVVVRRRRRRRRRRRRRRRRRRRRRREEEEEEEEERRRRRRRRRRREEEEEEEEEGGGGCCCCCCDDDDDDDDCCCCCCLLLLLLLLQQQQQQQQQGGGGFFFFFFFFFFFQQQQQQQQQIIIIIIIITTTTTTTHHHHHHHHHHSSSSSSLLLLLLLLGGGGGGGGGGGGTTTTTTTGGGGAAAAAGGGGMMMMMMMMGGGGTTTTTTTLLLLLLLLLLLLLLLLIIIIIIIISSSSSSKKKKKKKKKIIIIIIIIRRRRRRRRRRREEEEEEEEEEEEEEEEEEFFFFFFFFFFFPPPPPPPDDDDDDDDRRRRRRRRRRRMMMMMMMMMMMMMMMMAAAAATTTTTTTFFFFFFFFFFFSSSSSSVVVVVVVVVVVVVVPPPPPPPSSSSSSPPPPPPPKKKKKKKKKVVVVVVVSSSSSSDDDDDDDDTTTTTTTVVVVVVVVVVVVVVEEEEEEEEEPPPPPPPYYYYYYYYYYYYNNNNNNNNAAAAATTTTTTTLLLLLLLLSSSSSSIIIIIIIIHHHHHHHHHHQQQQQQQQQLLLLLLLLVVVVVVVEEEEEEEEENNNNNNNNSSSSSSDDDDDDDDEEEEEEEEETTTTTTTFFFFFFFFFFFCCCCCCIIIIIIIIDDDDDDDDNNNNNNNNEEEEEEEEEAAAAALLLLLLLLYYYYYYYYYYYYDDDDDDDDIIIIIIIICCCCCCMMMMMMMMRRRRRRRRRRRTTTTTTTLLLLLLLLKKKKKKKKKLLLLLLLLNNNNNNNNNNNNNNNNPPPPPPPSSSSSSYYYYYYYYYYYYGGGGDDDDDDDDLLLLLLLLNNNNNNNNHHHHHHHHHHLLLLLLLLVVVVVVVSSSSSSAAAAAVVVVVVVMMMMMMMMSSSSSSGGGGVVVVVVVTTTTTTTTTTTTTTCCCCCCLLLLLLLLRRRRRRRRRRRFFFFFFFFFFFPPPPPPPGGGGQQQQQQQQQLLLLLLLLNNNNNNNNSSSSSSDDDDDDDDLLLLLLLLRRRRRRRRRRRKKKKKKKKKLLLLLLLLAAAAAVVVVVVVNNNNNNNNMMMMMMMMVVVVVVVPPPPPPPFFFFFFFFFFFPPPPPPPRRRRRRRRRRRLLLLLLLLHHHHHHHHHHFFFFFFFFFFFFFFFFFFFFFFMMMMMMMMVVVVVVVGGGGFFFFFFFFFFFAAAAAPPPPPPPLLLLLLLLTTTTTTTSSSSSSRRRRRRRRRRRGGGGAAAAAHHHHHHHHHHSSSSSSFFFFFFFFFFFRRRRRRRRRRRAAAAAVVVVVVVTTTTTTTVVVVVVVPPPPPPPEEEEEEEEELLLLLLLLTTTTTTTQQQQQQQQQQQQQQQQQQMMMMMMMMFFFFFFFFFFFDDDDDDDDPPPPPPPKKKKKKKKKNNNNNNNNMMMMMMMMMMMMMMMMAAAAAAAAAASSSSSSDDDDDDDDFFFFFFFFFFFRRRRRRRRRRRNNNNNNNNGGGGRRRRRRRRRRRYYYYYYYYYYYYLLLLLLLLTTTTTTTCCCCCCSSSSSSAAAAAYYYYYYYYYYYYFFFFFFFFFFFRRRRRRRRRRRGGGGKKKKKKKKKVVVVVVVSSSSSSMMMMMMMMKKKKKKKKKEEEEEEEEEVVVVVVVEEEEEEEEEDDDDDDDDQQQQQQQQQMMMMMMMMRRRRRRRRRRRNNNNNNNNVVVVVVVQQQQQQQQQNNNNNNNNKKKKKKKKKNNNNNNNNSSSSSSSSSSSSYYYYYYYYYYYYFFFFFFFFFFFVVVVVVVEEEEEEEEEWWWWWWWWWWWWWWIIIIIIIIPPPPPPPNNNNNNNNNNNNNNNNVVVVVVVQQQQQQQQQTTTTTTTAAAAALLLLLLLLCCCCCCSSSSSSVVVVVVVPPPPPPPPPPPPPPRRRRRRRRRRRGGGGLLLLLLLLKKKKKKKKKMMMMMMMMSSSSSSAAAAATTTTTTTFFFFFFFFFFFVVVVVVVGGGGNNNNNNNNSSSSSSTTTTTTTSSSSSSIIIIIIIIQQQQQQQQQEEEEEEEEELLLLLLLLFFFFFFFFFFFKKKKKKKKKRRRRRRRRRRRIIIIIIIIGGGGDDDDDDDDQQQQQQQQQFFFFFFFFFFFTTTTTTTAAAAAMMMMMMMMFFFFFFFFFFFRRRRRRRRRRRRRRRRRRRRRRKKKKKKKKKAAAAAFFFFFFFFFFFLLLLLLLLHHHHHHHHHHWWWWWWWWWWWWWWYYYYYYYYYYYYTTTTTTTGGGGEEEEEEEEEGGGGMMMMMMMMDDDDDDDDEEEEEEEEEMMMMMMMMEEEEEEEEEFFFFFFFFFFFTTTTTTTEEEEEEEEEAAAAAEEEEEEEEESSSSSSNNNNNNNNMMMMMMMMNNNNNNNNDDDDDDDDLLLLLLLLVVVVVVVSSSSSSEEEEEEEEEYYYYYYYYYYYYQQQQQQQQQQQQQQQQQQYYYYYYYYYYYYQQQQQQQQQEEEEEEEEEAAAAASSSSSSIIIIIIIISSSSSSEEEEEEEEEGGGGEEEEEEEEEEEEEEEEEEEEEEEEEEEYYYYYYYYYYYYDDDDDDDDEEEEEEEEEEEEEEEEEEAAAAAPPPPPPPLLLLLLLLEEEEEEEEEAAAAAEEEEEEEEEEEEEEEEEEE

SEQ ID NO: 237 - protein, 3496 aa, Phytophthora cinnamomi
MMMMMMMMRRRRRRRRRRREEEEEEEEELLLLLLLLVVVVVVVHHHHHHHHHHIIIIIIIIQQQQQQQQQGGGGGGGGQQQQQQQQQCCCCCCGGGGNNNNNNNNQQQQQQQQQIIIIIIIIGGGGAAAAAKKKKKKKKKFFFFFFFFFFFWWWWWWWWWWWWWWEEEEEEEEEVVVVVVVIIIIIIIISSSSSSDDDDDDDDEEEEEEEEEHHHHHHHHHHGGGGVVVVVVVDDDDDDDDPPPPPPPTTTTTTTGGGGSSSSSSYYYYYYYYYYYYHHHHHHHHHHGGGGDDDDDDDDSSSSSSDDDDDDDDLLLLLLLLQQQQQQQQQLLLLLLLLEEEEEEEEERRRRRRRRRRRIIIIIIIINNNNNNNNVVVVVVVYYYYYYYYYYYYYYYYYYYYYYYYNNNNNNNNEEEEEEEEEAAAAATTTTTTTGGGGGGGGRRRRRRRRRRRYYYYYYYYYYYYVVVVVVVPPPPPPPRRRRRRRRRRRAAAAAIIIIIIIILLLLLLLLMMMMMMMMDDDDDDDDLLLLLLLLEEEEEEEEEPPPPPPPGGGGTTTTTTTMMMMMMMMDDDDDDDDSSSSSSVVVVVVVRRRRRRRRRRRAAAAAGGGGPPPPPPPYYYYYYYYYYYYGGGGQQQQQQQQQLLLLLLLLFFFFFFFFFFFRRRRRRRRRRRPPPPPPPDDDDDDDDNNNNNNNNFFFFFFFFFFFVVVVVVVFFFFFFFFFFFGGGGQQQQQQQQQTTTTTTTGGGGAAAAAGGGGNNNNNNNNNNNNNNNNWWWWWWWWWWWWWWAAAAAKKKKKKKKKGGGGHHHHHHHHHHYYYYYYYYYYYYTTTTTTTEEEEEEEEEGGGGAAAAAEEEEEEEEELLLLLLLLIIIIIIIIDDDDDDDDSSSSSSVVVVVVVLLLLLLLLDDDDDDDDVVVVVVVVVVVVVVRRRRRRRRRRRKKKKKKKKKEEEEEEEEEAAAAAEEEEEEEEESSSSSSCCCCCCDDDDDDDDCCCCCCLLLLLLLLQQQQQQQQQGGGGFFFFFFFFFFFQQQQQQQQQIIIIIIIITTTTTTTHHHHHHHHHHSSSSSSLLLLLLLLGGGGGGGGGGGGTTTTTTTGGGGSSSSSSGGGGMMMMMMMMGGGGTTTTTTTLLLLLLLLLLLLLLLLIIIIIIIISSSSSSKKKKKKKKKIIIIIIIIRRRRRRRRRRREEEEEEEEEEEEEEEEEEYYYYYYYYYYYYPPPPPPPDDDDDDDDRRRRRRRRRRRIIIIIIIIMMMMMMMMCCCCCCTTTTTTTYYYYYYYYYYYYSSSSSSVVVVVVVCCCCCCPPPPPPPSSSSSSPPPPPPPKKKKKKKKKVVVVVVVSSSSSSDDDDDDDDTTTTTTTVVVVVVVVVVVVVVEEEEEEEEEPPPPPPPYYYYYYYYYYYYNNNNNNNNAAAAATTTTTTTLLLLLLLLSSSSSSVVVVVVVHHHHHHHHHHQQQQQQQQQLLLLLLLLVVVVVVVEEEEEEEEENNNNNNNNAAAAADDDDDDDDEEEEEEEEEVVVVVVVMMMMMMMMCCCCCCLLLLLLLLDDDDDDDDNNNNNNNNEEEEEEEEEAAAAALLLLLLLLYYYYYYYYYYYYDDDDDDDDIIIIIIIICCCCCCFFFFFFFFFFFRRRRRRRRRRRTTTTTTTLLLLLLLLKKKKKKKKKLLLLLLLLTTTTTTTNNNNNNNNPPPPPPPTTTTTTTYYYYYYYYYYYYGGGGDDDDDDDDLLLLLLLLNNNNNNNNHHHHHHHHHHLLLLLLLLVVVVVVVCCCCCCAAAAAAAAAAMMMMMMMMSSSSSSGGGGIIIIIIIITTTTTTTTTTTTTTCCCCCCLLLLLLLLRRRRRRRRRRRFFFFFFFFFFFPPPPPPPGGGGQQQQQQQQQLLLLLLLLNNNNNNNNSSSSSSVVVVVVVLLLLLLLLKKKKKKKKKLLLLLLLLFFFFFFFFFFFAAAAAVVVVVVVNNNNNNNNLLLLLLLLIIIIIIIIPPPPPPPFFFFFFFFFFFPPPPPPPRRRRRRRRRRRLLLLLLLLHHHHHHHHHHFFFFFFFFFFFFFFFFFFFFFFMMMMMMMMIIIIIIIIGGGGFFFFFFFFFFFAAAAAPPPPPPPLLLLLLLLTTTTTTTSSSSSSRRRRRRRRRRRGGGGSSSSSSQQQQQQQQQQQQQQQQQQYYYYYYYYYYYYRRRRRRRRRRRAAAAALLLLLLLLTTTTTTTVVVVVVVPPPPPPPEEEEEEEEELLLLLLLLTTTTTTTQQQQQQQQQQQQQQQQQQQQQQQQQQQFFFFFFFFFFFDDDDDDDDAAAAAKKKKKKKKKNNNNNNNNMMMMMMMMMMMMMMMMCCCCCCAAAAAAAAAADDDDDDDDPPPPPPPRRRRRRRRRRRHHHHHHHHHHGGGGRRRRRRRRRRRYYYYYYYYYYYYLLLLLLLLTTTTTTTAAAAAAAAAACCCCCCMMMMMMMMFFFFFFFFFFFRRRRRRRRRRRGGGGRRRRRRRRRRRMMMMMMMMSSSSSSTTTTTTTKKKKKKKKKEEEEEEEEEVVVVVVVDDDDDDDDEEEEEEEEEQQQQQQQQQMMMMMMMMLLLLLLLLNNNNNNNNVVVVVVVQQQQQQQQQNNNNNNNNKKKKKKKKKNNNNNNNNSSSSSSSSSSSSYYYYYYYYYYYYFFFFFFFFFFFVVVVVVVEEEEEEEEEWWWWWWWWWWWWWWIIIIIIIIPPPPPPPNNNNNNNNNNNNNNNNIIIIIIIIKKKKKKKKKAAAAASSSSSSVVVVVVVCCCCCCDDDDDDDDIIIIIIIIPPPPPPPPPPPPPPQQQQQQQQQGGGGLLLLLLLLKKKKKKKKKMMMMMMMMSSSSSSTTTTTTTTTTTTTTFFFFFFFFFFFIIIIIIIIGGGGNNNNNNNNSSSSSSTTTTTTTAAAAAIIIIIIIIQQQQQQQQQEEEEEEEEEMMMMMMMMFFFFFFFFFFFKKKKKKKKKRRRRRRRRRRRVVVVVVVSSSSSSEEEEEEEEEQQQQQQQQQFFFFFFFFFFFTTTTTTTAAAAAMMMMMMMMFFFFFFFFFFFRRRRRRRRRRRRRRRRRRRRRRKKKKKKKKKAAAAAFFFFFFFFFFFLLLLLLLLHHHHHHHHHHWWWWWWWWWWWWWWYYYYYYYYYYYYTTTTTTTGGGGEEEEEEEEEGGGGMMMMMMMMDDDDDDDDEEEEEEEEEMMMMMMMMEEEEEEEEEFFFFFFFFFFFTTTTTTTEEEEEEEEEAAAAAEEEEEEEEESSSSSSNNNNNNNNMMMMMMMMNNNNNNNNDDDDDDDDLLLLLLLLVVVVVVVSSSSSSEEEEEEEEEYYYYYYYYYYYYQQQQQQQQQQQQQQQQQQYYYYYYYYYYYYQQQQQQQQQDDDDDDDDGGGGTTTTTTTAAAAAEEEEEEEEEEEEEEEEEEEEEEEEEEEGGGGEEEEEEEEEFFFFFFFFFFFDDDDDDDDEEEEEEEEEDDDDDDDDEEEEEEEEEEEEEEEEEEWWWWWWWWWWWWWWMMMMMMMMRRRRRRRRRRRR

SEQ ID NO: 238 - protein, 3498 aa, Sus scrofa
MMMMMMMMRRRRRRRRRRREEEEEEEEEIIIIIIIIVVVVVVVHHHHHHHHHHIIIIIIIIQQQQQQQQQAAAAAGGGGQQQQQQQQQCCCCCCGGGGNNNNNNNNQQQQQQQQQIIIIIIIIGGGGAAAAAKKKKKKKKKFFFFFFFFFFFWWWWWWWWWWWWWWEEEEEEEEEVVVVVVVIIIIIIIISSSSSSDDDDDDDDEEEEEEEEEHHHHHHHHHHGGGGIIIIIIIIDDDDDDDDPPPPPPPTTTTTTTGGGGSSSSSSYYYYYYYYYYYYHHHHHHHHHHGGGGDDDDDDDDSSSSSSDDDDDDDDLLLLLLLLQQQQQQQQQLLLLLLLLEEEEEEEEERRRRRRRRRRRIIIIIIIINNNNNNNNVVVVVVVYYYYYYYYYYYYYYYYYYYYYYYYNNNNNNNNEEEEEEEEEAAAAAAAAAAGGGGNNNNNNNNKKKKKKKKKYYYYYYYYYYYYVVVVVVVPPPPPPPRRRRRRRRRRRAAAAAIIIIIIIILLLLLLLLVVVVVVVDDDDDDDDLLLLLLLLEEEEEEEEEPPPPPPPGGGGTTTTTTTMMMMMMMMDDDDDDDDSSSSSSVVVVVVVRRRRRRRRRRRSSSSSSGGGGPPPPPPPFFFFFFFFFFFGGGGQQQQQQQQQIIIIIIIIFFFFFFFFFFFRRRRRRRRRRRPPPPPPPDDDDDDDDNNNNNNNNFFFFFFFFFFFVVVVVVVFFFFFFFFFFFGGGGQQQQQQQQQSSSSSSGGGGAAAAAGGGGNNNNNNNNNNNNNNNNWWWWWWWWWWWWWWAAAAAKKKKKKKKKGGGGHHHHHHHHHHYYYYYYYYYYYYTTTTTTTEEEEEEEEEGGGGAAAAAEEEEEEEEELLLLLLLLVVVVVVVDDDDDDDDSSSSSSVVVVVVVLLLLLLLLDDDDDDDDVVVVVVVVVVVVVVRRRRRRRRRRRKKKKKKKKKEEEEEEEEESSSSSSEEEEEEEEESSSSSSCCCCCCDDDDDDDDCCCCCCLLLLLLLLQQQQQQQQQGGGGFFFFFFFFFFFQQQQQQQQQLLLLLLLLTTTTTTTHHHHHHHHHHSSSSSSLLLLLLLLGGGGGGGGGGGGTTTTTTTGGGGSSSSSSGGGGMMMMMMMMGGGGTTTTTTTLLLLLLLLLLLLLLLLIIIIIIIISSSSSSKKKKKKKKKIIIIIIIIRRRRRRRRRRREEEEEEEEEEEEEEEEEEYYYYYYYYYYYYPPPPPPPDDDDDDDDRRRRRRRRRRRIIIIIIIIMMMMMMMMNNNNNNNNTTTTTTTFFFFFFFFFFFSSSSSSVVVVVVVVVVVVVVPPPPPPPSSSSSSPPPPPPPKKKKKKKKKVVVVVVVSSSSSSDDDDDDDDTTTTTTTVVVVVVVVVVVVVVEEEEEEEEEPPPPPPPYYYYYYYYYYYYNNNNNNNNAAAAATTTTTTTLLLLLLLLSSSSSSVVVVVVVHHHHHHHHHHQQQQQQQQQLLLLLLLLVVVVVVVEEEEEEEEENNNNNNNNTTTTTTTDDDDDDDDEEEEEEEEETTTTTTTYYYYYYYYYYYYCCCCCCIIIIIIIIDDDDDDDDNNNNNNNNEEEEEEEEEAAAAALLLLLLLLYYYYYYYYYYYYDDDDDDDDIIIIIIIICCCCCCFFFFFFFFFFFRRRRRRRRRRRTTTTTTTLLLLLLLLKKKKKKKKKLLLLLLLLTTTTTTTTTTTTTTPPPPPPPTTTTTTTYYYYYYYYYYYYGGGGDDDDDDDDLLLLLLLLNNNNNNNNHHHHHHHHHHLLLLLLLLVVVVVVVSSSSSSAAAAATTTTTTTMMMMMMMMSSSSSSGGGGVVVVVVVTTTTTTTTTTTTTTCCCCCCLLLLLLLLRRRRRRRRRRRFFFFFFFFFFFPPPPPPPGGGGQQQQQQQQQLLLLLLLLNNNNNNNNAAAAADDDDDDDDLLLLLLLLRRRRRRRRRRRKKKKKKKKKLLLLLLLLAAAAAVVVVVVVNNNNNNNNMMMMMMMMVVVVVVVPPPPPPPFFFFFFFFFFFPPPPPPPRRRRRRRRRRRLLLLLLLLHHHHHHHHHHFFFFFFFFFFFFFFFFFFFFFFMMMMMMMMPPPPPPPGGGGFFFFFFFFFFFAAAAAPPPPPPPLLLLLLLLTTTTTTTSSSSSSRRRRRRRRRRRGGGGSSSSSSQQQQQQQQQQQQQQQQQQYYYYYYYYYYYYRRRRRRRRRRRAAAAALLLLLLLLTTTTTTTVVVVVVVPPPPPPPEEEEEEEEELLLLLLLLTTTTTTTQQQQQQQQQQQQQQQQQQMMMMMMMMFFFFFFFFFFFDDDDDDDDAAAAAKKKKKKKKKNNNNNNNNMMMMMMMMMMMMMMMMAAAAAAAAAACCCCCCDDDDDDDDPPPPPPPRRRRRRRRRRRHHHHHHHHHHGGGGRRRRRRRRRRRYYYYYYYYYYYYLLLLLLLLTTTTTTTVVVVVVVAAAAAAAAAAVVVVVVVFFFFFFFFFFFRRRRRRRRRRRGGGGRRRRRRRRRRRMMMMMMMMSSSSSSMMMMMMMMKKKKKKKKKEEEEEEEEEVVVVVVVDDDDDDDDEEEEEEEEEQQQQQQQQQMMMMMMMMLLLLLLLLNNNNNNNNVVVVVVVQQQQQQQQQNNNNNNNNKKKKKKKKKNNNNNNNNSSSSSSSSSSSSYYYYYYYYYYYYFFFFFFFFFFFVVVVVVVEEEEEEEEEWWWWWWWWWWWWWWIIIIIIIIPPPPPPPNNNNNNNNNNNNNNNNVVVVVVVKKKKKKKKKTTTTTTTAAAAAVVVVVVVCCCCCCDDDDDDDDIIIIIIIIPPPPPPPPPPPPPPRRRRRRRRRRRGGGGLLLLLLLLKKKKKKKKKMMMMMMMMSSSSSSAAAAATTTTTTTFFFFFFFFFFFIIIIIIIIGGGGNNNNNNNNSSSSSSTTTTTTTAAAAAIIIIIIIIQQQQQQQQQEEEEEEEEELLLLLLLLFFFFFFFFFFFKKKKKKKKKRRRRRRRRRRRIIIIIIIISSSSSSEEEEEEEEEQQQQQQQQQFFFFFFFFFFFTTTTTTTAAAAAMMMMMMMMFFFFFFFFFFFRRRRRRRRRRRRRRRRRRRRRRKKKKKKKKKAAAAAFFFFFFFFFFFLLLLLLLLHHHHHHHHHHWWWWWWWWWWWWWWYYYYYYYYYYYYTTTTTTTGGGGEEEEEEEEEGGGGMMMMMMMMDDDDDDDDEEEEEEEEEMMMMMMMMEEEEEEEEEFFFFFFFFFFFTTTTTTTEEEEEEEEEAAAAAEEEEEEEEESSSSSSNNNNNNNNMMMMMMMMNNNNNNNNDDDDDDDDLLLLLLLLVVVVVVVSSSSSSEEEEEEEEEYYYYYYYYYYYYQQQQQQQQQQQQQQQQQQYYYYYYYYYYYYQQQQQQQQQDDDDDDDDAAAAATTTTTTTAAAAADDDDDDDDEEEEEEEEEQQQQQQQQQGGGGEEEEEEEEEFFFFFFFFFFFEEEEEEEEEEEEEEEEEEEEEEEEEEEGGGGEEEEEEEEEEEEEEEEEEDDDDDDDDEEEEEEEEEAAAAAA

SEQ ID NO: 239 - protein, 3494 aa, Plasmodium falciparum
MMMMMMMMRRRRRRRRRRREEEEEEEEEIIIIIIIIVVVVVVVHHHHHHHHHHIIIIIIIIQQQQQQQQQAAAAAGGGGQQQQQQQQQCCCCCCGGGGNNNNNNNNQQQQQQQQQIIIIIIIIGGGGAAAAAKKKKKKKKKFFFFFFFFFFFWWWWWWWWWWWWWWEEEEEEEEEVVVVVVVIIIIIIIISSSSSSDDDDDDDDEEEEEEEEEHHHHHHHHHHGGGGIIIIIIIIDDDDDDDDPPPPPPPSSSSSSGGGGTTTTTTTYYYYYYYYYYYYSSSSSSGGGGDDDDDDDDSSSSSSDDDDDDDDLLLLLLLLQQQQQQQQQLLLLLLLLEEEEEEEEERRRRRRRRRRRVVVVVVVDDDDDDDDVVVVVVVFFFFFFFFFFFYYYYYYYYYYYYNNNNNNNNEEEEEEEEEAAAAATTTTTTTGGGGGGGGRRRRRRRRRRRYYYYYYYYYYYYVVVVVVVPPPPPPPRRRRRRRRRRRAAAAAIIIIIIIILLLLLLLLMMMMMMMMDDDDDDDDLLLLLLLLEEEEEEEEEPPPPPPPGGGGTTTTTTTMMMMMMMMDDDDDDDDSSSSSSVVVVVVVRRRRRRRRRRRAAAAAGGGGPPPPPPPFFFFFFFFFFFGGGGQQQQQQQQQLLLLLLLLFFFFFFFFFFFRRRRRRRRRRRPPPPPPPDDDDDDDDNNNNNNNNFFFFFFFFFFFVVVVVVVFFFFFFFFFFFGGGGQQQQQQQQQTTTTTTTGGGGAAAAAGGGGNNNNNNNNNNNNNNNNWWWWWWWWWWWWWWAAAAAKKKKKKKKKGGGGHHHHHHHHHHYYYYYYYYYYYYTTTTTTTEEEEEEEEEGGGGAAAAAEEEEEEEEELLLLLLLLIIIIIIIIDDDDDDDDAAAAAVVVVVVVLLLLLLLLDDDDDDDDVVVVVVVLLLLLLLLRRRRRRRRRRRKKKKKKKKKEEEEEEEEEAAAAAEEEEEEEEEGGGGCCCCCCDDDDDDDDCCCCCCLLLLLLLLQQQQQQQQQGGGGFFFFFFFFFFFQQQQQQQQQIIIIIIIITTTTTTTHHHHHHHHHHSSSSSSLLLLLLLLGGGGGGGGGGGGTTTTTTTGGGGSSSSSSGGGGMMMMMMMMGGGGTTTTTTTLLLLLLLLLLLLLLLLIIIIIIIISSSSSSKKKKKKKKKIIIIIIIIRRRRRRRRRRREEEEEEEEEEEEEEEEEEYYYYYYYYYYYYPPPPPPPDDDDDDDDRRRRRRRRRRRIIIIIIIIMMMMMMMMEEEEEEEEETTTTTTTFFFFFFFFFFFSSSSSSVVVVVVVFFFFFFFFFFFPPPPPPPSSSSSSPPPPPPPKKKKKKKKKVVVVVVVSSSSSSDDDDDDDDTTTTTTTVVVVVVVVVVVVVVEEEEEEEEEPPPPPPPYYYYYYYYYYYYNNNNNNNNAAAAATTTTTTTLLLLLLLLSSSSSSVVVVVVVHHHHHHHHHHQQQQQQQQQLLLLLLLLVVVVVVVEEEEEEEEENNNNNNNNAAAAADDDDDDDDEEEEEEEEEVVVVVVVQQQQQQQQQVVVVVVVIIIIIIIIDDDDDDDDNNNNNNNNEEEEEEEEEAAAAALLLLLLLLYYYYYYYYYYYYDDDDDDDDIIIIIIIICCCCCCFFFFFFFFFFFRRRRRRRRRRRTTTTTTTLLLLLLLLKKKKKKKKKLLLLLLLLTTTTTTTTTTTTTTPPPPPPPTTTTTTTYYYYYYYYYYYYGGGGDDDDDDDDLLLLLLLLNNNNNNNNHHHHHHHHHHLLLLLLLLVVVVVVVSSSSSSAAAAAAAAAAMMMMMMMMSSSSSSGGGGVVVVVVVTTTTTTTCCCCCCSSSSSSLLLLLLLLRRRRRRRRRRRFFFFFFFFFFFPPPPPPPGGGGQQQQQQQQQLLLLLLLLNNNNNNNNSSSSSSDDDDDDDDLLLLLLLLRRRRRRRRRRRKKKKKKKKKLLLLLLLLAAAAAVVVVVVVNNNNNNNNLLLLLLLLIIIIIIIIPPPPPPPFFFFFFFFFFFPPPPPPPRRRRRRRRRRRLLLLLLLLHHHHHHHHHHFFFFFFFFFFFFFFFFFFFFFFMMMMMMMMYYYYYYYYYYYYGGGGFFFFFFFFFFFAAAAAPPPPPPPLLLLLLLLTTTTTTTSSSSSSRRRRRRRRRRRGGGGSSSSSSQQQQQQQQQQQQQQQQQQYYYYYYYYYYYYRRRRRRRRRRRAAAAALLLLLLLLTTTTTTTVVVVVVVPPPPPPPEEEEEEEEELLLLLLLLTTTTTTTQQQQQQQQQQQQQQQQQQMMMMMMMMFFFFFFFFFFFDDDDDDDDAAAAAKKKKKKKKKNNNNNNNNMMMMMMMMMMMMMMMMCCCCCCTTTTTTTSSSSSSDDDDDDDDPPPPPPPRRRRRRRRRRRHHHHHHHHHHGGGGRRRRRRRRRRRYYYYYYYYYYYYLLLLLLLLTTTTTTTAAAAACCCCCCAAAAAMMMMMMMMFFFFFFFFFFFRRRRRRRRRRRGGGGRRRRRRRRRRRMMMMMMMMSSSSSSTTTTTTTKKKKKKKKKEEEEEEEEEVVVVVVVDDDDDDDDEEEEEEEEEQQQQQQQQQMMMMMMMMLLLLLLLLNNNNNNNNVVVVVVVQQQQQQQQQNNNNNNNNKKKKKKKKKNNNNNNNNSSSSSSSSSSSSYYYYYYYYYYYYFFFFFFFFFFFVVVVVVVEEEEEEEEEWWWWWWWWWWWWWWIIIIIIIIPPPPPPPHHHHHHHHHHNNNNNNNNTTTTTTTKKKKKKKKKSSSSSSSSSSSSVVVVVVVCCCCCCDDDDDDDDIIIIIIIIPPPPPPPPPPPPPPLLLLLLLLGGGGLLLLLLLLKKKKKKKKKMMMMMMMMAAAAAVVVVVVVTTTTTTTFFFFFFFFFFFVVVVVVVGGGGNNNNNNNNSSSSSSTTTTTTTAAAAAIIIIIIIIQQQQQQQQQEEEEEEEEEMMMMMMMMFFFFFFFFFFFKKKKKKKKKRRRRRRRRRRRVVVVVVVSSSSSSDDDDDDDDQQQQQQQQQFFFFFFFFFFFTTTTTTTAAAAAMMMMMMMMFFFFFFFFFFFRRRRRRRRRRRRRRRRRRRRRRKKKKKKKKKAAAAAFFFFFFFFFFFLLLLLLLLHHHHHHHHHHWWWWWWWWWWWWWWYYYYYYYYYYYYTTTTTTTGGGGEEEEEEEEEGGGGMMMMMMMMDDDDDDDDEEEEEEEEEMMMMMMMMEEEEEEEEEFFFFFFFFFFFTTTTTTTEEEEEEEEEAAAAAEEEEEEEEESSSSSSNNNNNNNNMMMMMMMMNNNNNNNNDDDDDDDDLLLLLLLLVVVVVVVSSSSSSEEEEEEEEEYYYYYYYYYYYYQQQQQQQQQQQQQQQQQQYYYYYYYYYYYYQQQQQQQQQDDDDDDDDAAAAATTTTTTTAAAAAEEEEEEEEEEEEEEEEEEEEEEEEEEEGGGGEEEEEEEEEFFFFFFFFFFFEEEEEEEEEEEEEEEEEEEEEEEEEEEEEEEEEEEEGGGGDDDDDDDDVVVVVVVEEEEEEEEEAAAAAA

SEQ ID NO: 240 - protein, 3488 aa, Plasmodium falciparum
MMMMMMMMRRRRRRRRRRREEEEEEEEEIIIIIIIIVVVVVVVHHHHHHHHHHIIIIIIIIQQQQQQQQQAAAAAGGGGQQQQQQQQQCCCCCCGGGGNNNNNNNNQQQQQQQQQIIIIIIIIGGGGAAAAAKKKKKKKKKFFFFFFFFFFFWWWWWWWWWWWWWWEEEEEEEEEVVVVVVVIIIIIIIISSSSSSDDDDDDDDEEEEEEEEEHHHHHHHHHHGGGGIIIIIIIIDDDDDDDDPPPPPPPSSSSSSGGGGTTTTTTTYYYYYYYYYYYYCCCCCCGGGGDDDDDDDDSSSSSSDDDDDDDDLLLLLLLLQQQQQQQQQLLLLLLLLEEEEEEEEERRRRRRRRRRRVVVVVVVDDDDDDDDVVVVVVVFFFFFFFFFFFYYYYYYYYYYYYNNNNNNNNEEEEEEEEEAAAAATTTTTTTGGGGGGGGRRRRRRRRRRRYYYYYYYYYYYYVVVVVVVPPPPPPPRRRRRRRRRRRAAAAAIIIIIIIILLLLLLLLMMMMMMMMDDDDDDDDLLLLLLLLEEEEEEEEEPPPPPPPGGGGTTTTTTTMMMMMMMMDDDDDDDDSSSSSSVVVVVVVRRRRRRRRRRRAAAAAGGGGPPPPPPPFFFFFFFFFFFGGGGQQQQQQQQQLLLLLLLLFFFFFFFFFFFRRRRRRRRRRRPPPPPPPDDDDDDDDNNNNNNNNFFFFFFFFFFFVVVVVVVFFFFFFFFFFFGGGGQQQQQQQQQTTTTTTTGGGGAAAAAGGGGNNNNNNNNNNNNNNNNWWWWWWWWWWWWWWAAAAAKKKKKKKKKGGGGHHHHHHHHHHYYYYYYYYYYYYTTTTTTTEEEEEEEEEGGGGAAAAAEEEEEEEEELLLLLLLLIIIIIIIIDDDDDDDDAAAAAVVVVVVVLLLLLLLLDDDDDDDDVVVVVVVVVVVVVVRRRRRRRRRRRKKKKKKKKKEEEEEEEEEAAAAAEEEEEEEEEGGGGCCCCCCDDDDDDDDCCCCCCLLLLLLLLQQQQQQQQQGGGGFFFFFFFFFFFQQQQQQQQQIIIIIIIITTTTTTTHHHHHHHHHHSSSSSSLLLLLLLLGGGGGGGGGGGGTTTTTTTGGGGSSSSSSGGGGMMMMMMMMGGGGTTTTTTTLLLLLLLLLLLLLLLLIIIIIIIISSSSSSKKKKKKKKKIIIIIIIIRRRRRRRRRRREEEEEEEEEEEEEEEEEEYYYYYYYYYYYYPPPPPPPDDDDDDDDRRRRRRRRRRRIIIIIIIIMMMMMMMMEEEEEEEEETTTTTTTFFFFFFFFFFFSSSSSSVVVVVVVFFFFFFFFFFFPPPPPPPSSSSSSPPPPPPPKKKKKKKKKVVVVVVVSSSSSSDDDDDDDDTTTTTTTVVVVVVVVVVVVVVEEEEEEEEEPPPPPPPYYYYYYYYYYYYNNNNNNNNAAAAATTTTTTTLLLLLLLLSSSSSSVVVVVVVHHHHHHHHHHQQQQQQQQQLLLLLLLLVVVVVVVEEEEEEEEENNNNNNNNAAAAADDDDDDDDEEEEEEEEEVVVVVVVQQQQQQQQQVVVVVVVIIIIIIIIDDDDDDDDNNNNNNNNEEEEEEEEEAAAAALLLLLLLLYYYYYYYYYYYYDDDDDDDDIIIIIIIICCCCCCFFFFFFFFFFFRRRRRRRRRRRTTTTTTTLLLLLLLLKKKKKKKKKLLLLLLLLTTTTTTTTTTTTTTPPPPPPPTTTTTTTYYYYYYYYYYYYGGGGDDDDDDDDLLLLLLLLNNNNNNNNHHHHHHHHHHLLLLLLLLVVVVVVVSSSSSSAAAAAAAAAAMMMMMMMMSSSSSSGGGGVVVVVVVTTTTTTTCCCCCCSSSSSSLLLLLLLLRRRRRRRRRRRFFFFFFFFFFFPPPPPPPGGGGQQQQQQQQQLLLLLLLLNNNNNNNNSSSSSSDDDDDDDDLLLLLLLLRRRRRRRRRRRKKKKKKKKKLLLLLLLLAAAAAVVVVVVVNNNNNNNNLLLLLLLLIIIIIIIIPPPPPPPFFFFFFFFFFFPPPPPPPRRRRRRRRRRRLLLLLLLLHHHHHHHHHHFFFFFFFFFFFFFFFFFFFFFFMMMMMMMMIIIIIIIIGGGGFFFFFFFFFFFAAAAAPPPPPPPLLLLLLLLTTTTTTTSSSSSSRRRRRRRRRRRGGGGSSSSSSQQQQQQQQQQQQQQQQQQYYYYYYYYYYYYRRRRRRRRRRRAAAAALLLLLLLLTTTTTTTVVVVVVVPPPPPPPEEEEEEEEELLLLLLLLTTTTTTTQQQQQQQQQQQQQQQQQQMMMMMMMMFFFFFFFFFFFDDDDDDDDAAAAAKKKKKKKKKNNNNNNNNMMMMMMMMMMMMMMMMCCCCCCAAAAASSSSSSDDDDDDDDPPPPPPPRRRRRRRRRRRHHHHHHHHHHGGGGRRRRRRRRRRRYYYYYYYYYYYYLLLLLLLLTTTTTTTAAAAACCCCCCAAAAAMMMMMMMMFFFFFFFFFFFRRRRRRRRRRRGGGGRRRRRRRRRRRMMMMMMMMSSSSSSTTTTTTTKKKKKKKKKEEEEEEEEEVVVVVVVDDDDDDDDEEEEEEEEEQQQQQQQQQMMMMMMMMLLLLLLLLNNNNNNNNVVVVVVVQQQQQQQQQNNNNNNNNKKKKKKKKKNNNNNNNNSSSSSSSSSSSSYYYYYYYYYYYYFFFFFFFFFFFVVVVVVVEEEEEEEEEWWWWWWWWWWWWWWIIIIIIIIPPPPPPPHHHHHHHHHHNNNNNNNNTTTTTTTKKKKKKKKKSSSSSSSSSSSSVVVVVVVCCCCCCDDDDDDDDIIIIIIIIPPPPPPPPPPPPPPKKKKKKKKKGGGGLLLLLLLLKKKKKKKKKMMMMMMMMAAAAAVVVVVVVTTTTTTTFFFFFFFFFFFVVVVVVVGGGGNNNNNNNNSSSSSSTTTTTTTAAAAAIIIIIIIIQQQQQQQQQEEEEEEEEEMMMMMMMMFFFFFFFFFFFKKKKKKKKKRRRRRRRRRRRVVVVVVVSSSSSSDDDDDDDDQQQQQQQQQFFFFFFFFFFFTTTTTTTAAAAAMMMMMMMMFFFFFFFFFFFRRRRRRRRRRRRRRRRRRRRRRKKKKKKKKKAAAAAFFFFFFFFFFFLLLLLLLLHHHHHHHHHHWWWWWWWWWWWWWWYYYYYYYYYYYYTTTTTTTGGGGEEEEEEEEEGGGGMMMMMMMMDDDDDDDDEEEEEEEEEMMMMMMMMEEEEEEEEEFFFFFFFFFFFTTTTTTTEEEEEEEEEAAAAAEEEEEEEEESSSSSSNNNNNNNNMMMMMMMMNNNNNNNNDDDDDDDDLLLLLLLLVVVVVVVSSSSSSEEEEEEEEEYYYYYYYYYYYYQQQQQQQQQQQQQQQQQQYYYYYYYYYYYYQQQQQQQQQDDDDDDDDAAAAATTTTTTTAAAAAEEEEEEEEEEEEEEEEEEEEEEEEEEEGGGGEEEEEEEEEFFFFFFFFFFFEEEEEEEEEEEEEEEEEEEEEEEEEEEEEEEEEEEEGGGGDDDDDDDDVVVVVVVEEEEEEEEEAAAAAA

SEQ ID NO: 241 - protein, 3510 aa, Pleurotus sajor-caju
MMMMMMMMRRRRRRRRRRREEEEEEEEEIIIIIIIIVVVVVVVHHHHHHHHHHLLLLLLLLQQQQQQQQQTTTTTTTGGGGQQQQQQQQQCCCCCCRRRRRRRRRRRNNNNNNNNQQQQQQQQQIIIIIIIIGGGGAAAAAKKKKKKKKKFFFFFFFFFFFWWWWWWWWWWWWWWEEEEEEEEEVVVVVVVVVVVVVVSSSSSSDDDDDDDDEEEEEEEEEHHHHHHHHHHGGGGIIIIIIIIEEEEEEEEEPPPPPPPDDDDDDDDGGGGLLLLLLLLYYYYYYYYYYYYKKKKKKKKKGGGGNNNNNNNNNNNNNNNNDDDDDDDDLLLLLLLLQQQQQQQQQLLLLLLLLEEEEEEEEERRRRRRRRRRRIIIIIIIISSSSSSVVVVVVVYYYYYYYYYYYYYYYYYYYYYYYYNNNNNNNNEEEEEEEEEVVVVVVVGGGGAAAAANNNNNNNNKKKKKKKKKYYYYYYYYYYYYVVVVVVVPPPPPPPRRRRRRRRRRRAAAAAVVVVVVVLLLLLLLLVVVVVVVDDDDDDDDLLLLLLLLEEEEEEEEEPPPPPPPGGGGTTTTTTTMMMMMMMMDDDDDDDDSSSSSSVVVVVVVRRRRRRRRRRRSSSSSSGGGGPPPPPPPLLLLLLLLGGGGSSSSSSLLLLLLLLFFFFFFFFFFFRRRRRRRRRRRPPPPPPPDDDDDDDDNNNNNNNNFFFFFFFFFFFVVVVVVVFFFFFFFFFFFGGGGQQQQQQQQQSSSSSSGGGGGGGGGGGGNNNNNNNNNNNNNNNNWWWWWWWWWWWWWWAAAAAKKKKKKKKKGGGGHHHHHHHHHHYYYYYYYYYYYYTTTTTTTEEEEEEEEEGGGGAAAAAEEEEEEEEELLLLLLLLVVVVVVVDDDDDDDDAAAAAVVVVVVVLLLLLLLLDDDDDDDDVVVVVVVVVVVVVVRRRRRRRRRRRKKKKKKKKKEEEEEEEEEAAAAAEEEEEEEEEGGGGTTTTTTTDDDDDDDDCCCCCCLLLLLLLLQQQQQQQQQGGGGFFFFFFFFFFFQQQQQQQQQIIIIIIIITTTTTTTHHHHHHHHHHSSSSSSLLLLLLLLGGGGGGGGGGGGTTTTTTTGGGGAAAAAGGGGMMMMMMMMGGGGTTTTTTTLLLLLLLLLLLLLLLLIIIIIIIISSSSSSKKKKKKKKKIIIIIIIIRRRRRRRRRRREEEEEEEEEEEEEEEEEEYYYYYYYYYYYYPPPPPPPDDDDDDDDRRRRRRRRRRRMMMMMMMMMMMMMMMMCCCCCCTTTTTTTYYYYYYYYYYYYSSSSSSVVVVVVVVVVVVVVPPPPPPPSSSSSSPPPPPPPKKKKKKKKKVVVVVVVSSSSSSDDDDDDDDTTTTTTTVVVVVVVVVVVVVVEEEEEEEEEPPPPPPPYYYYYYYYYYYYNNNNNNNNAAAAATTTTTTTLLLLLLLLSSSSSSVVVVVVVHHHHHHHHHHQQQQQQQQQLLLLLLLLVVVVVVVEEEEEEEEENNNNNNNNSSSSSSDDDDDDDDEEEEEEEEETTTTTTTFFFFFFFFFFFCCCCCCIIIIIIIIDDDDDDDDNNNNNNNNEEEEEEEEEAAAAALLLLLLLLYYYYYYYYYYYYDDDDDDDDIIIIIIIICCCCCCFFFFFFFFFFFRRRRRRRRRRRTTTTTTTLLLLLLLLKKKKKKKKKLLLLLLLLTTTTTTTTTTTTTTPPPPPPPTTTTTTTYYYYYYYYYYYYGGGGDDDDDDDDLLLLLLLLNNNNNNNNHHHHHHHHHHLLLLLLLLIIIIIIIISSSSSSIIIIIIIIVVVVVVVMMMMMMMMSSSSSSGGGGIIIIIIIITTTTTTTTTTTTTTCCCCCCLLLLLLLLRRRRRRRRRRRFFFFFFFFFFFPPPPPPPGGGGQQQQQQQQQLLLLLLLLNNNNNNNNSSSSSSDDDDDDDDLLLLLLLLRRRRRRRRRRRKKKKKKKKKLLLLLLLLAAAAAVVVVVVVNNNNNNNNMMMMMMMMVVVVVVVPPPPPPPFFFFFFFFFFFPPPPPPPRRRRRRRRRRRLLLLLLLLHHHHHHHHHHFFFFFFFFFFFFFFFFFFFFFFMMMMMMMMPPPPPPPGGGGVVVVVVVCCCCCCPPPPPPPLLLLLLLLTTTTTTTAAAAARRRRRRRRRRRGGGGSSSSSSQQQQQQQQQQQQQQQQQQYYYYYYYYYYYYRRRRRRRRRRRAAAAAVVVVVVVTTTTTTTVVVVVVVPPPPPPPEEEEEEEEELLLLLLLLTTTTTTTQQQQQQQQQQQQQQQQQQMMMMMMMMFFFFFFFFFFFDDDDDDDDAAAAAKKKKKKKKKNNNNNNNNMMMMMMMMMMMMMMMMAAAAAAAAAASSSSSSDDDDDDDDPPPPPPPRRRRRRRRRRRHHHHHHHHHHGGGGRRRRRRRRRRRYYYYYYYYYYYYLLLLLLLLTTTTTTTVVVVVVVAAAAAAAAAAVVVVVVVFFFFFFFFFFFRRRRRRRRRRRGGGGKKKKKKKKKVVVVVVVSSSSSSMMMMMMMMKKKKKKKKKEEEEEEEEEVVVVVVVEEEEEEEEEEEEEEEEEEQQQQQQQQQMMMMMMMMQQQQQQQQQNNNNNNNNVVVVVVVQQQQQQQQQNNNNNNNNKKKKKKKKKNNNNNNNNSSSSSSAAAAAYYYYYYYYYYYYFFFFFFFFFFFVVVVVVVEEEEEEEEEWWWWWWWWWWWWWWIIIIIIIIPPPPPPPNNNNNNNNNNNNNNNNVVVVVVVLLLLLLLLTTTTTTTAAAAAQQQQQQQQQCCCCCCDDDDDDDDIIIIIIIIPPPPPPPPPPPPPPRRRRRRRRRRRGGGGCCCCCCKKKKKKKKKMMMMMMMMAAAAAVVVVVVVTTTTTTTFFFFFFFFFFFLLLLLLLLGGGGNNNNNNNNSSSSSSTTTTTTTAAAAAIIIIIIIIQQQQQQQQQEEEEEEEEELLLLLLLLFFFFFFFFFFFKKKKKKKKKRRRRRRRRRRRVVVVVVVNNNNNNNNDDDDDDDDQQQQQQQQQFFFFFFFFFFFAAAAAAAAAAMMMMMMMMFFFFFFFFFFFKKKKKKKKKRRRRRRRRRRRKKKKKKKKKAAAAAFFFFFFFFFFFLLLLLLLLHHHHHHHHHHWWWWWWWWWWWWWWYYYYYYYYYYYYTTTTTTTQQQQQQQQQEEEEEEEEEGGGGMMMMMMMMDDDDDDDDEEEEEEEEEMMMMMMMMEEEEEEEEEFFFFFFFFFFFTTTTTTTEEEEEEEEEAAAAAEEEEEEEEESSSSSSNNNNNNNNMMMMMMMMQQQQQQQQQDDDDDDDDLLLLLLLLVVVVVVVAAAAAEEEEEEEEEYYYYYYYYYYYYQQQQQQQQQQQQQQQQQQYYYYYYYYYYYYQQQQQQQQQDDDDDDDDAAAAATTTTTTTAAAAADDDDDDDDEEEEEEEEEEEEEEEEEEEEEEEEEEEGGGGEEEEEEEEEYYYYYYYYYYYYEEEEEEEEEEEEEEEEEEEEEEEEEEEPPPPPPPAAAAAEEEEEEEEEEEEEEEEEEEEEEEEEEEQQQQQQQQQQ

SEQ ID NO: 242 - protein, 3445 aa, Pneumocystis carinii
MMMMMMMMRRRRRRRRRRREEEEEEEEEIIIIIIIIVVVVVVVHHHHHHHHHHLLLLLLLLQQQQQQQQQTTTTTTTGGGGQQQQQQQQQCCCCCCGGGGNNNNNNNNQQQQQQQQQIIIIIIIIGGGGAAAAASSSSSSFFFFFFFFFFFWWWWWWWWWWWWWWSSSSSSTTTTTTTIIIIIIIISSSSSSGGGGEEEEEEEEEHHHHHHHHHHGGGGLLLLLLLLDDDDDDDDSSSSSSTTTTTTTGGGGVVVVVVVYYYYYYYYYYYYQQQQQQQQQGGGGTTTTTTTSSSSSSDDDDDDDDLLLLLLLLQQQQQQQQQLLLLLLLLEEEEEEEEERRRRRRRRRRRMMMMMMMMNNNNNNNNVVVVVVVYYYYYYYYYYYYFFFFFFFFFFFNNNNNNNNEEEEEEEEEAAAAASSSSSSGGGGGGGGKKKKKKKKKYYYYYYYYYYYYVVVVVVVPPPPPPPRRRRRRRRRRRSSSSSSIIIIIIIILLLLLLLLIIIIIIIIDDDDDDDDLLLLLLLLEEEEEEEEEPPPPPPPGGGGTTTTTTTMMMMMMMMDDDDDDDDAAAAAVVVVVVVRRRRRRRRRRRSSSSSSGGGGPPPPPPPFFFFFFFFFFFGGGGNNNNNNNNLLLLLLLLFFFFFFFFFFFRRRRRRRRRRRPPPPPPPDDDDDDDDNNNNNNNNFFFFFFFFFFFVVVVVVVFFFFFFFFFFFGGGGQQQQQQQQQSSSSSSGGGGAAAAAGGGGNNNNNNNNNNNNNNNNWWWWWWWWWWWWWWAAAAAKKKKKKKKKGGGGHHHHHHHHHHYYYYYYYYYYYYTTTTTTTEEEEEEEEEGGGGAAAAAEEEEEEEEELLLLLLLLVVVVVVVDDDDDDDDSSSSSSVVVVVVVLLLLLLLLDDDDDDDDVVVVVVVVVVVVVVRRRRRRRRRRRRRRRRRRRRRREEEEEEEEEAAAAAEEEEEEEEEAAAAACCCCCCDDDDDDDDCCCCCCLLLLLLLLQQQQQQQQQGGGGFFFFFFFFFFFQQQQQQQQQIIIIIIIITTTTTTTHHHHHHHHHHSSSSSSLLLLLLLLGGGGGGGGGGGGTTTTTTTGGGGAAAAAGGGGMMMMMMMMGGGGTTTTTTTLLLLLLLLLLLLLLLLIIIIIIIISSSSSSKKKKKKKKKIIIIIIIIRRRRRRRRRRREEEEEEEEEEEEEEEEEEYYYYYYYYYYYYPPPPPPPDDDDDDDDRRRRRRRRRRRMMMMMMMMMMMMMMMMAAAAATTTTTTTFFFFFFFFFFFSSSSSSVVVVVVVVVVVVVVPPPPPPPSSSSSSPPPPPPPKKKKKKKKKVVVVVVVSSSSSSDDDDDDDDTTTTTTTVVVVVVVVVVVVVVEEEEEEEEEPPPPPPPYYYYYYYYYYYYNNNNNNNNAAAAATTTTTTTLLLLLLLLSSSSSSVVVVVVVHHHHHHHHHHQQQQQQQQQLLLLLLLLVVVVVVVEEEEEEEEENNNNNNNNSSSSSSDDDDDDDDEEEEEEEEETTTTTTTFFFFFFFFFFFCCCCCCIIIIIIIIDDDDDDDDNNNNNNNNEEEEEEEEEAAAAALLLLLLLLYYYYYYYYYYYYDDDDDDDDIIIIIIIICCCCCCMMMMMMMMRRRRRRRRRRRTTTTTTTLLLLLLLLKKKKKKKKKLLLLLLLLPPPPPPPDDDDDDDDPPPPPPPGGGGYYYYYYYYYYYYGGGGDDDDDDDDLLLLLLLLNNNNNNNNHHHHHHHHHHLLLLLLLLVVVVVVVSSSSSSAAAAAVVVVVVVMMMMMMMMSSSSSSGGGGIIIIIIIITTTTTTTTTTTTTTCCCCCCLLLLLLLLRRRRRRRRRRRFFFFFFFFFFFPPPPPPPGGGGQQQQQQQQQLLLLLLLLNNNNNNNNSSSSSSDDDDDDDDLLLLLLLLRRRRRRRRRRRKKKKKKKKKLLLLLLLLAAAAAVVVVVVVNNNNNNNNMMMMMMMMVVVVVVVPPPPPPPFFFFFFFFFFFPPPPPPPRRRRRRRRRRRLLLLLLLLHHHHHHHHHHFFFFFFFFFFFFFFFFFFFFFFIIIIIIIIVVVVVVVGGGGFFFFFFFFFFFAAAAAPPPPPPPLLLLLLLLTTTTTTTSSSSSSKKKKKKKKKGGGGSSSSSSHHHHHHHHHHSSSSSSFFFFFFFFFFFRRRRRRRRRRRSSSSSSLLLLLLLLTTTTTTTVVVVVVVPPPPPPPEEEEEEEEELLLLLLLLTTTTTTTQQQQQQQQQQQQQQQQQQMMMMMMMMFFFFFFFFFFFDDDDDDDDAAAAAKKKKKKKKKNNNNNNNNMMMMMMMMMMMMMMMMAAAAAAAAAASSSSSSDDDDDDDDPPPPPPPRRRRRRRRRRRHHHHHHHHHHGGGGRRRRRRRRRRRYYYYYYYYYYYYLLLLLLLLTTTTTTTVVVVVVVAAAAAAAAAAIIIIIIIIFFFFFFFFFFFRRRRRRRRRRRGGGGRRRRRRRRRRRVVVVVVVSSSSSSMMMMMMMMKKKKKKKKKEEEEEEEEEVVVVVVVEEEEEEEEEDDDDDDDDQQQQQQQQQMMMMMMMMHHHHHHHHHHSSSSSSVVVVVVVQQQQQQQQQQQQQQQQQQKKKKKKKKKNNNNNNNNSSSSSSSSSSSSYYYYYYYYYYYYFFFFFFFFFFFVVVVVVVEEEEEEEEEWWWWWWWWWWWWWWIIIIIIIIPPPPPPPNNNNNNNNNNNNNNNNVVVVVVVQQQQQQQQQTTTTTTTAAAAALLLLLLLLCCCCCCSSSSSSIIIIIIIIPPPPPPPPPPPPPPRRRRRRRRRRRGGGGLLLLLLLLKKKKKKKKKMMMMMMMMSSSSSSSSSSSSTTTTTTTFFFFFFFFFFFIIIIIIIIGGGGNNNNNNNNSSSSSSTTTTTTTSSSSSSIIIIIIIIQQQQQQQQQEEEEEEEEELLLLLLLLFFFFFFFFFFFKKKKKKKKKRRRRRRRRRRRVVVVVVVGGGGDDDDDDDDQQQQQQQQQFFFFFFFFFFFSSSSSSAAAAAMMMMMMMMFFFFFFFFFFFRRRRRRRRRRRRRRRRRRRRRRKKKKKKKKKAAAAAFFFFFFFFFFFLLLLLLLLHHHHHHHHHHWWWWWWWWWWWWWWYYYYYYYYYYYYTTTTTTTGGGGEEEEEEEEEGGGGMMMMMMMMDDDDDDDDEEEEEEEEEMMMMMMMMEEEEEEEEEFFFFFFFFFFFTTTTTTTEEEEEEEEEAAAAAEEEEEEEEESSSSSSNNNNNNNNMMMMMMMMNNNNNNNNDDDDDDDDLLLLLLLLVVVVVVVSSSSSSEEEEEEEEEYYYYYYYYYYYYQQQQQQQQQQQQQQQQQQYYYYYYYYYYYYEEEEEEEEEIIIIIIIIAAAAAGGGGVVVVVVVDDDDDDDDEEEEEEEEEEEEEEEEEEVVVVVVVEEEEEEEEELLLLLLLLDDDDDDDDDDDDDDDDEEEEEEEEEIIIIIIIIEEEEEEEEETTTTTTTT

SEQ ID NO: 243 - protein, 3472 aa, Polytomella agilis
MMMMMMMMRRRRRRRRRRREEEEEEEEEIIIIIIIIVVVVVVVHHHHHHHHHHIIIIIIIIQQQQQQQQQGGGGGGGGQQQQQQQQQCCCCCCGGGGNNNNNNNNQQQQQQQQQIIIIIIIIGGGGAAAAAKKKKKKKKKFFFFFFFFFFFWWWWWWWWWWWWWWEEEEEEEEEVVVVVVVVVVVVVVSSSSSSDDDDDDDDEEEEEEEEEHHHHHHHHHHGGGGIIIIIIIIDDDDDDDDPPPPPPPTTTTTTTGGGGTTTTTTTAAAAALLLLLLLLGGGGDDDDDDDDSSSSSSDDDDDDDDLLLLLLLLQQQQQQQQQLLLLLLLLEEEEEEEEERRRRRRRRRRRIIIIIIIINNNNNNNNVVVVVVVYYYYYYYYYYYYFFFFFFFFFFFNNNNNNNNEEEEEEEEEAAAAATTTTTTTGGGGSSSSSSRRRRRRRRRRRYYYYYYYYYYYYVVVVVVVPPPPPPPRRRRRRRRRRRAAAAAIIIIIIIILLLLLLLLMMMMMMMMDDDDDDDDLLLLLLLLEEEEEEEEEPPPPPPPGGGGTTTTTTTMMMMMMMMDDDDDDDDSSSSSSVVVVVVVRRRRRRRRRRRSSSSSSGGGGPPPPPPPYYYYYYYYYYYYGGGGQQQQQQQQQIIIIIIIIFFFFFFFFFFFRRRRRRRRRRRPPPPPPPDDDDDDDDNNNNNNNNFFFFFFFFFFFVVVVVVVFFFFFFFFFFFGGGGQQQQQQQQQTTTTTTTGGGGAAAAAGGGGNNNNNNNNNNNNNNNNWWWWWWWWWWWWWWAAAAAKKKKKKKKKGGGGHHHHHHHHHHYYYYYYYYYYYYTTTTTTTEEEEEEEEEGGGGAAAAAEEEEEEEEELLLLLLLLIIIIIIIIDDDDDDDDSSSSSSVVVVVVVLLLLLLLLDDDDDDDDVVVVVVVVVVVVVVRRRRRRRRRRRKKKKKKKKKEEEEEEEEEAAAAAEEEEEEEEESSSSSSCCCCCCDDDDDDDDCCCCCCLLLLLLLLQQQQQQQQQGGGGFFFFFFFFFFFQQQQQQQQQVVVVVVVCCCCCCHHHHHHHHHHSSSSSSLLLLLLLLGGGGGGGGGGGGTTTTTTTGGGGSSSSSSGGGGMMMMMMMMGGGGTTTTTTTLLLLLLLLLLLLLLLLIIIIIIIISSSSSSKKKKKKKKKIIIIIIIIRRRRRRRRRRREEEEEEEEEEEEEEEEEEYYYYYYYYYYYYPPPPPPPDDDDDDDDRRRRRRRRRRRMMMMMMMMMMMMMMMMLLLLLLLLTTTTTTTFFFFFFFFFFFSSSSSSVVVVVVVVVVVVVVPPPPPPPSSSSSSPPPPPPPKKKKKKKKKVVVVVVVSSSSSSDDDDDDDDTTTTTTTVVVVVVVVVVVVVVEEEEEEEEEPPPPPPPYYYYYYYYYYYYNNNNNNNNAAAAATTTTTTTLLLLLLLLSSSSSSVVVVVVVHHHHHHHHHHQQQQQQQQQLLLLLLLLVVVVVVVEEEEEEEEENNNNNNNNAAAAADDDDDDDDEEEEEEEEECCCCCCMMMMMMMMVVVVVVVLLLLLLLLDDDDDDDDNNNNNNNNEEEEEEEEEAAAAALLLLLLLLYYYYYYYYYYYYDDDDDDDDIIIIIIIICCCCCCFFFFFFFFFFFRRRRRRRRRRRTTTTTTTLLLLLLLLKKKKKKKKKLLLLLLLLTTTTTTTTTTTTTTPPPPPPPTTTTTTTFFFFFFFFFFFGGGGDDDDDDDDLLLLLLLLNNNNNNNNHHHHHHHHHHLLLLLLLLIIIIIIIISSSSSSAAAAAVVVVVVVMMMMMMMMSSSSSSGGGGIIIIIIIITTTTTTTCCCCCCCCCCCCLLLLLLLLRRRRRRRRRRRFFFFFFFFFFFPPPPPPPGGGGQQQQQQQQQLLLLLLLLNNNNNNNNAAAAADDDDDDDDLLLLLLLLRRRRRRRRRRRKKKKKKKKKLLLLLLLLAAAAAVVVVVVVNNNNNNNNLLLLLLLLIIIIIIIIPPPPPPPFFFFFFFFFFFPPPPPPPRRRRRRRRRRRLLLLLLLLHHHHHHHHHHFFFFFFFFFFFFFFFFFFFFFFMMMMMMMMVVVVVVVGGGGFFFFFFFFFFFTTTTTTTPPPPPPPLLLLLLLLTTTTTTTSSSSSSRRRRRRRRRRRGGGGSSSSSSQQQQQQQQQQQQQQQQQQYYYYYYYYYYYYRRRRRRRRRRRAAAAALLLLLLLLTTTTTTTVVVVVVVPPPPPPPEEEEEEEEELLLLLLLLTTTTTTTQQQQQQQQQQQQQQQQQQMMMMMMMMWWWWWWWWWWWWWWDDDDDDDDAAAAAKKKKKKKKKNNNNNNNNMMMMMMMMMMMMMMMMCCCCCCAAAAAAAAAADDDDDDDDPPPPPPPRRRRRRRRRRRHHHHHHHHHHGGGGRRRRRRRRRRRYYYYYYYYYYYYLLLLLLLLTTTTTTTAAAAASSSSSSAAAAALLLLLLLLFFFFFFFFFFFRRRRRRRRRRRGGGGRRRRRRRRRRRMMMMMMMMSSSSSSTTTTTTTKKKKKKKKKEEEEEEEEEVVVVVVVDDDDDDDDEEEEEEEEEQQQQQQQQQMMMMMMMMLLLLLLLLNNNNNNNNVVVVVVVQQQQQQQQQNNNNNNNNKKKKKKKKKNNNNNNNNSSSSSSSSSSSSYYYYYYYYYYYYFFFFFFFFFFFVVVVVVVEEEEEEEEEWWWWWWWWWWWWWWIIIIIIIIPPPPPPPNNNNNNNNNNNNNNNNVVVVVVVKKKKKKKKKSSSSSSSSSSSSVVVVVVVCCCCCCDDDDDDDDIIIIIIIIPPPPPPPPPPPPPPKKKKKKKKKGGGGLLLLLLLLKKKKKKKKKMMMMMMMMSSSSSSAAAAATTTTTTTFFFFFFFFFFFIIIIIIIIGGGGNNNNNNNNSSSSSSTTTTTTTAAAAAIIIIIIIIQQQQQQQQQEEEEEEEEEMMMMMMMMFFFFFFFFFFFKKKKKKKKKRRRRRRRRRRRVVVVVVVSSSSSSEEEEEEEEEQQQQQQQQQFFFFFFFFFFFTTTTTTTAAAAAMMMMMMMMFFFFFFFFFFFRRRRRRRRRRRRRRRRRRRRRRKKKKKKKKKAAAAAFFFFFFFFFFFLLLLLLLLHHHHHHHHHHWWWWWWWWWWWWWWYYYYYYYYYYYYTTTTTTTGGGGEEEEEEEEEGGGGMMMMMMMMDDDDDDDDEEEEEEEEEMMMMMMMMEEEEEEEEEFFFFFFFFFFFTTTTTTTEEEEEEEEEAAAAAEEEEEEEEESSSSSSNNNNNNNNMMMMMMMMNNNNNNNNDDDDDDDDLLLLLLLLVVVVVVVSSSSSSEEEEEEEEEYYYYYYYYYYYYQQQQQQQQQQQQQQQQQQYYYYYYYYYYYYQQQQQQQQQDDDDDDDDAAAAASSSSSSAAAAAEEEEEEEEEEEEEEEEEEEEEEEEEEEGGGGEEEEEEEEEFFFFFFFFFFFGGGGEEEEEEEEEEEEEEEEEEEEEEEEEEEEEEEEEEEEEEEEEEEEENNNNNNNNN

SEQ ID NO: 244 - protein, 3490 aa, Pseudopleuronectes americanus
MMMMMMMMRRRRRRRRRRREEEEEEEEEIIIIIIIILLLLLLLLHHHHHHHHHHLLLLLLLLQQQQQQQQQAAAAAGGGGQQQQQQQQQCCCCCCGGGGNNNNNNNNQQQQQQQQQIIIIIIIIGGGGAAAAAKKKKKKKKKFFFFFFFFFFFWWWWWWWWWWWWWWEEEEEEEEEVVVVVVVIIIIIIIISSSSSSDDDDDDDDEEEEEEEEEHHHHHHHHHHGGGGIIIIIIIIDDDDDDDDPPPPPPPSSSSSSGGGGTTTTTTTYYYYYYYYYYYYHHHHHHHHHHGGGGDDDDDDDDNNNNNNNNEEEEEEEEELLLLLLLLQQQQQQQQQLLLLLLLLEEEEEEEEERRRRRRRRRRRIIIIIIIINNNNNNNNVVVVVVVYYYYYYYYYYYYYYYYYYYYYYYYNNNNNNNNEEEEEEEEEAAAAATTTTTTTGGGGGGGGKKKKKKKKKYYYYYYYYYYYYVVVVVVVPPPPPPPRRRRRRRRRRRAAAAAVVVVVVVLLLLLLLLVVVVVVVDDDDDDDDLLLLLLLLEEEEEEEEEPPPPPPPGGGGTTTTTTTMMMMMMMMDDDDDDDDSSSSSSVVVVVVVRRRRRRRRRRRSSSSSSGGGGAAAAAFFFFFFFFFFFGGGGQQQQQQQQQIIIIIIIIFFFFFFFFFFFRRRRRRRRRRRPPPPPPPDDDDDDDDNNNNNNNNFFFFFFFFFFFVVVVVVVFFFFFFFFFFFGGGGQQQQQQQQQSSSSSSGGGGAAAAAGGGGNNNNNNNNNNNNNNNNWWWWWWWWWWWWWWAAAAAKKKKKKKKKGGGGHHHHHHHHHHYYYYYYYYYYYYTTTTTTTEEEEEEEEEGGGGAAAAAEEEEEEEEELLLLLLLLVVVVVVVDDDDDDDDSSSSSSVVVVVVVLLLLLLLLDDDDDDDDVVVVVVVVVVVVVVRRRRRRRRRRRKKKKKKKKKEEEEEEEEEAAAAAEEEEEEEEESSSSSSCCCCCCDDDDDDDDCCCCCCLLLLLLLLQQQQQQQQQGGGGFFFFFFFFFFFQQQQQQQQQLLLLLLLLTTTTTTTHHHHHHHHHHSSSSSSLLLLLLLLGGGGGGGGGGGGTTTTTTTGGGGSSSSSSGGGGMMMMMMMMGGGGTTTTTTTLLLLLLLLLLLLLLLLIIIIIIIISSSSSSKKKKKKKKKIIIIIIIIRRRRRRRRRRREEEEEEEEEEEEEEEEEEYYYYYYYYYYYYPPPPPPPDDDDDDDDRRRRRRRRRRRIIIIIIIIMMMMMMMMNNNNNNNNTTTTTTTFFFFFFFFFFFSSSSSSVVVVVVVVVVVVVVPPPPPPPSSSSSSPPPPPPPKKKKKKKKKVVVVVVVSSSSSSDDDDDDDDTTTTTTTVVVVVVVVVVVVVVEEEEEEEEEPPPPPPPYYYYYYYYYYYYNNNNNNNNAAAAATTTTTTTLLLLLLLLSSSSSSVVVVVVVHHHHHHHHHHQQQQQQQQQLLLLLLLLVVVVVVVEEEEEEEEENNNNNNNNTTTTTTTDDDDDDDDEEEEEEEEETTTTTTTYYYYYYYYYYYYCCCCCCIIIIIIIIDDDDDDDDNNNNNNNNEEEEEEEEEAAAAALLLLLLLLYYYYYYYYYYYYDDDDDDDDIIIIIIIICCCCCCFFFFFFFFFFFRRRRRRRRRRRTTTTTTTLLLLLLLLKKKKKKKKKLLLLLLLLTTTTTTTTTTTTTTPPPPPPPTTTTTTTYYYYYYYYYYYYGGGGDDDDDDDDLLLLLLLLNNNNNNNNHHHHHHHHHHLLLLLLLLVVVVVVVSSSSSSAAAAATTTTTTTMMMMMMMMSSSSSSGGGGVVVVVVVTTTTTTTTTTTTTTCCCCCCLLLLLLLLRRRRRRRRRRRFFFFFFFFFFFPPPPPPPGGGGQQQQQQQQQLLLLLLLLNNNNNNNNAAAAADDDDDDDDLLLLLLLLRRRRRRRRRRRKKKKKKKKKLLLLLLLLAAAAAVVVVVVVNNNNNNNNMMMMMMMMVVVVVVVPPPPPPPFFFFFFFFFFFPPPPPPPRRRRRRRRRRRLLLLLLLLHHHHHHHHHHFFFFFFFFFFFFFFFFFFFFFFMMMMMMMMPPPPPPPGGGGFFFFFFFFFFFAAAAAPPPPPPPLLLLLLLLTTTTTTTSSSSSSRRRRRRRRRRRGGGGSSSSSSQQQQQQQQQQQQQQQQQQYYYYYYYYYYYYRRRRRRRRRRRAAAAALLLLLLLLTTTTTTTVVVVVVVPPPPPPPEEEEEEEEELLLLLLLLTTTTTTTQQQQQQQQQQQQQQQQQQMMMMMMMMFFFFFFFFFFFDDDDDDDDAAAAAKKKKKKKKKNNNNNNNNMMMMMMMMMMMMMMMMAAAAAAAAAACCCCCCDDDDDDDDPPPPPPPRRRRRRRRRRRHHHHHHHHHHGGGGRRRRRRRRRRRYYYYYYYYYYYYLLLLLLLLTTTTTTTVVVVVVVAAAAAAAAAAIIIIIIIIFFFFFFFFFFFRRRRRRRRRRRGGGGRRRRRRRRRRRMMMMMMMMSSSSSSMMMMMMMMKKKKKKKKKEEEEEEEEEVVVVVVVDDDDDDDDEEEEEEEEEQQQQQQQQQMMMMMMMMLLLLLLLLNNNNNNNNVVVVVVVQQQQQQQQQNNNNNNNNKKKKKKKKKNNNNNNNNSSSSSSSSSSSSYYYYYYYYYYYYFFFFFFFFFFFVVVVVVVEEEEEEEEEWWWWWWWWWWWWWWIIIIIIIIPPPPPPPNNNNNNNNNNNNNNNNVVVVVVVKKKKKKKKKTTTTTTTAAAAAVVVVVVVCCCCCCDDDDDDDDIIIIIIIIPPPPPPPPPPPPPPRRRRRRRRRRRGGGGLLLLLLLLKKKKKKKKKMMMMMMMMSSSSSSSSSSSSTTTTTTTFFFFFFFFFFFIIIIIIIIGGGGNNNNNNNNSSSSSSTTTTTTTAAAAAIIIIIIIIQQQQQQQQQEEEEEEEEELLLLLLLLFFFFFFFFFFFKKKKKKKKKRRRRRRRRRRRMMMMMMMMSSSSSSEEEEEEEEEQQQQQQQQQFFFFFFFFFFFTTTTTTTAAAAAMMMMMMMMFFFFFFFFFFFRRRRRRRRRRRRRRRRRRRRRRKKKKKKKKKAAAAAFFFFFFFFFFFLLLLLLLLHHHHHHHHHHWWWWWWWWWWWWWWYYYYYYYYYYYYTTTTTTTGGGGEEEEEEEEEGGGGMMMMMMMMDDDDDDDDEEEEEEEEEMMMMMMMMEEEEEEEEEFFFFFFFFFFFTTTTTTTEEEEEEEEEAAAAAEEEEEEEEESSSSSSNNNNNNNNMMMMMMMMNNNNNNNNDDDDDDDDLLLLLLLLVVVVVVVSSSSSSEEEEEEEEEYYYYYYYYYYYYQQQQQQQQQQQQQQQQQQYYYYYYYYYYYYQQQQQQQQQDDDDDDDDAAAAATTTTTTTAAAAAEEEEEEEEEEEEEEEEEEEEEEEEEEEGGGGEEEEEEEEEGGGGEEEEEEEEEEEEEEEEEEEEEEEEEEEGGGGDDDDDDDDEEEEEEEEEEEEEEEEEEVVVVVVVAAAAAA

SEQ ID NO: 245 - protein, 3397 aa, Homo sapiens
MMMMMMMMRRRRRRRRRRREEEEEEEEEIIIIIIIIVVVVVVVLLLLLLLLTTTTTTTQQQQQQQQQTTTTTTTGGGGQQQQQQQQQCCCCCCGGGGNNNNNNNNQQQQQQQQQIIIIIIIIGGGGAAAAAKKKKKKKKKFFFFFFFFFFFWWWWWWWWWWWWWWEEEEEEEEEVVVVVVVIIIIIIIISSSSSSDDDDDDDDEEEEEEEEEHHHHHHHHHHAAAAAIIIIIIIIDDDDDDDDSSSSSSAAAAAGGGGTTTTTTTYYYYYYYYYYYYHHHHHHHHHHGGGGDDDDDDDDSSSSSSHHHHHHHHHHLLLLLLLLQQQQQQQQQLLLLLLLLEEEEEEEEERRRRRRRRRRRIIIIIIIINNNNNNNNVVVVVVVHHHHHHHHHHHHHHHHHHHHHHHHHHHHHHEEEEEEEEEAAAAASSSSSSGGGGGGGGRRRRRRRRRRRYYYYYYYYYYYYVVVVVVVPPPPPPPRRRRRRRRRRRAAAAAVVVVVVVLLLLLLLLVVVVVVVDDDDDDDDLLLLLLLLEEEEEEEEEPPPPPPPGGGGTTTTTTTMMMMMMMMDDDDDDDDSSSSSSVVVVVVVRRRRRRRRRRRSSSSSSGGGGPPPPPPPFFFFFFFFFFFAAAAAEEEEEEEEEVVVVVVVFFFFFFFFFFFRRRRRRRRRRRPPPPPPPDDDDDDDDNNNNNNNNFFFFFFFFFFFIIIIIIIISSSSSSRRRRRRRRRRRQQQQQQQQQCCCCCCGGGGAAAAAGGGGNNNNNNNNNNNNNNNNWWWWWWWWWWWWWWAAAAAKKKKKKKKKGGGGRRRRRRRRRRRYYYYYYYYYYYYTTTTTTTEEEEEEEEEGGGGAAAAAEEEEEEEEELLLLLLLLMMMMMMMMEEEEEEEEESSSSSSVVVVVVVMMMMMMMMDDDDDDDDVVVVVVVVVVVVVVRRRRRRRRRRRKKKKKKKKKEEEEEEEEEAAAAAEEEEEEEEESSSSSSCCCCCCDDDDDDDDCCCCCCLLLLLLLLQQQQQQQQQGGGGFFFFFFFFFFFQQQQQQQQQLLLLLLLLTTTTTTTHHHHHHHHHHSSSSSSLLLLLLLLGGGGGGGGGGGGTTTTTTTGGGGSSSSSSGGGGMMMMMMMMGGGGTTTTTTTLLLLLLLLLLLLLLLLLLLLLLLLSSSSSSKKKKKKKKKIIIIIIIIRRRRRRRRRRREEEEEEEEEEEEEEEEEEYYYYYYYYYYYYPPPPPPPDDDDDDDDRRRRRRRRRRRIIIIIIIIIIIIIIIINNNNNNNNTTTTTTTFFFFFFFFFFFSSSSSSIIIIIIIILLLLLLLLPPPPPPPSSSSSSPPPPPPPKKKKKKKKKVVVVVVVSSSSSSDDDDDDDDTTTTTTTVVVVVVVVVVVVVVEEEEEEEEEPPPPPPPYYYYYYYYYYYYNNNNNNNNAAAAATTTTTTTLLLLLLLLSSSSSSVVVVVVVHHHHHHHHHHQQQQQQQQQLLLLLLLLIIIIIIIIEEEEEEEEENNNNNNNNAAAAADDDDDDDDEEEEEEEEETTTTTTTFFFFFFFFFFFCCCCCCIIIIIIIIDDDDDDDDNNNNNNNNEEEEEEEEEAAAAALLLLLLLLYYYYYYYYYYYYDDDDDDDDIIIIIIIICCCCCCSSSSSSRRRRRRRRRRRTTTTTTTLLLLLLLLKKKKKKKKKLLLLLLLLPPPPPPPTTTTTTTPPPPPPPTTTTTTTYYYYYYYYYYYYGGGGDDDDDDDDLLLLLLLLNNNNNNNNHHHHHHHHHHLLLLLLLLVVVVVVVSSSSSSAAAAATTTTTTTVVVVVVVSSSSSSGGGGVVVVVVVTTTTTTTTTTTTTTCCCCCCLLLLLLLLRRRRRRRRRRRFFFFFFFFFFFPPPPPPPGGGGQQQQQQQQQLLLLLLLLNNNNNNNNAAAAADDDDDDDDLLLLLLLLRRRRRRRRRRRKKKKKKKKKLLLLLLLLAAAAAVVVVVVVNNNNNNNNMMMMMMMMVVVVVVVPPPPPPPFFFFFFFFFFFPPPPPPPRRRRRRRRRRRLLLLLLLLHHHHHHHHHHFFFFFFFFFFFFFFFFFFFFFFMMMMMMMMPPPPPPPGGGGFFFFFFFFFFFAAAAAPPPPPPPLLLLLLLLTTTTTTTSSSSSSQQQQQQQQQGGGGSSSSSSQQQQQQQQQQQQQQQQQQYYYYYYYYYYYYRRRRRRRRRRRAAAAALLLLLLLLTTTTTTTVVVVVVVAAAAAEEEEEEEEELLLLLLLLTTTTTTTQQQQQQQQQQQQQQQQQQMMMMMMMMFFFFFFFFFFFDDDDDDDDAAAAAKKKKKKKKKNNNNNNNNMMMMMMMMMMMMMMMMAAAAAAAAAARRRRRRRRRRRDDDDDDDDPPPPPPPRRRRRRRRRRRHHHHHHHHHHGGGGCCCCCCYYYYYYYYYYYYLLLLLLLLTTTTTTTAAAAAAAAAAAAAAAIIIIIIIIFFFFFFFFFFFRRRRRRRRRRRGGGGRRRRRRRRRRRMMMMMMMMPPPPPPPMMMMMMMMRRRRRRRRRRREEEEEEEEEVVVVVVVDDDDDDDDEEEEEEEEEQQQQQQQQQMMMMMMMMFFFFFFFFFFFNNNNNNNNIIIIIIIIQQQQQQQQQDDDDDDDDKKKKKKKKKNNNNNNNNSSSSSSSSSSSSYYYYYYYYYYYYFFFFFFFFFFFAAAAADDDDDDDDWWWWWWWWWWWWWWLLLLLLLLPPPPPPPNNNNNNNNNNNNNNNNIIIIIIIIKKKKKKKKKTTTTTTTAAAAAVVVVVVVCCCCCCDDDDDDDDIIIIIIIIPPPPPPPPPPPPPPWWWWWWWWWWWWWWGGGGLLLLLLLLKKKKKKKKKMMMMMMMMSSSSSSVVVVVVVTTTTTTTFFFFFFFFFFFTTTTTTTGGGGNNNNNNNNNNNNNNNNTTTTTTTAAAAAVVVVVVVQQQQQQQQQEEEEEEEEELLLLLLLLKKKKKKKKKRRRRRRRRRRRVVVVVVVSSSSSSEEEEEEEEEQQQQQQQQQFFFFFFFFFFFTTTTTTTAAAAATTTTTTTFFFFFFFFFFFRRRRRRRRRRRRRRRRRRRRRRKKKKKKKKKAAAAAFFFFFFFFFFFLLLLLLLLHHHHHHHHHHWWWWWWWWWWWWWWYYYYYYYYYYYYTTTTTTTGGGGEEEEEEEEEGGGGMMMMMMMMDDDDDDDDEEEEEEEEEMMMMMMMMEEEEEEEEEFFFFFFFFFFFTTTTTTTEEEEEEEEEAAAAAEEEEEEEEESSSSSSNNNNNNNNMMMMMMMMNNNNNNNNDDDDDDDDLLLLLLLLVVVVVVVSSSSSSEEEEEEEEEYYYYYYYYYYYYQQQQQQQQQQQQQQQQQQYYYYYYYYYYYYQQQQQQQQQDDDDDDDDAAAAATTTTTTTAAAAAEEEEEEEEEGGGGEEEEEEEEEGGGGVVVVVVVV

SEQ ID NO: 246 - protein, 3499 aa, Rhynchosporium secalis
MMMMMMMMRRRRRRRRRRREEEEEEEEEIIIIIIIIVVVVVVVHHHHHHHHHHLLLLLLLLQQQQQQQQQTTTTTTTGGGGQQQQQQQQQCCCCCCGGGGNNNNNNNNQQQQQQQQQIIIIIIIIGGGGAAAAAAAAAAFFFFFFFFFFFWWWWWWWWWWWWWWQQQQQQQQQTTTTTTTIIIIIIIISSSSSSGGGGEEEEEEEEEHHHHHHHHHHGGGGLLLLLLLLDDDDDDDDGGGGSSSSSSGGGGVVVVVVVYYYYYYYYYYYYNNNNNNNNGGGGTTTTTTTSSSSSSDDDDDDDDLLLLLLLLQQQQQQQQQLLLLLLLLEEEEEEEEERRRRRRRRRRRLLLLLLLLNNNNNNNNVVVVVVVYYYYYYYYYYYYFFFFFFFFFFFNNNNNNNNEEEEEEEEEAAAAASSSSSSGGGGNNNNNNNNKKKKKKKKKYYYYYYYYYYYYVVVVVVVPPPPPPPRRRRRRRRRRRAAAAAVVVVVVVLLLLLLLLVVVVVVVDDDDDDDDLLLLLLLLEEEEEEEEEPPPPPPPGGGGTTTTTTTMMMMMMMMDDDDDDDDAAAAAVVVVVVVRRRRRRRRRRRAAAAAGGGGPPPPPPPFFFFFFFFFFFGGGGQQQQQQQQQLLLLLLLLFFFFFFFFFFFRRRRRRRRRRRPPPPPPPDDDDDDDDNNNNNNNNFFFFFFFFFFFVVVVVVVFFFFFFFFFFFGGGGQQQQQQQQQSSSSSSGGGGAAAAAGGGGNNNNNNNNNNNNNNNNWWWWWWWWWWWWWWAAAAAKKKKKKKKKGGGGHHHHHHHHHHYYYYYYYYYYYYTTTTTTTEEEEEEEEEGGGGAAAAAEEEEEEEEELLLLLLLLVVVVVVVDDDDDDDDQQQQQQQQQVVVVVVVLLLLLLLLDDDDDDDDVVVVVVVVVVVVVVRRRRRRRRRRRRRRRRRRRRRREEEEEEEEEAAAAAEEEEEEEEEGGGGCCCCCCDDDDDDDDCCCCCCLLLLLLLLQQQQQQQQQGGGGFFFFFFFFFFFQQQQQQQQQIIIIIIIITTTTTTTHHHHHHHHHHSSSSSSLLLLLLLLGGGGGGGGGGGGTTTTTTTGGGGAAAAAGGGGMMMMMMMMGGGGTTTTTTTLLLLLLLLLLLLLLLLIIIIIIIISSSSSSKKKKKKKKKIIIIIIIIRRRRRRRRRRREEEEEEEEEEEEEEEEEEFFFFFFFFFFFPPPPPPPDDDDDDDDRRRRRRRRRRRMMMMMMMMMMMMMMMMAAAAATTTTTTTFFFFFFFFFFFSSSSSSVVVVVVVVVVVVVVPPPPPPPSSSSSSPPPPPPPKKKKKKKKKVVVVVVVSSSSSSDDDDDDDDTTTTTTTVVVVVVVVVVVVVVEEEEEEEEEPPPPPPPYYYYYYYYYYYYNNNNNNNNAAAAATTTTTTTLLLLLLLLSSSSSSIIIIIIIIHHHHHHHHHHQQQQQQQQQLLLLLLLLVVVVVVVEEEEEEEEENNNNNNNNSSSSSSDDDDDDDDEEEEEEEEETTTTTTTFFFFFFFFFFFCCCCCCIIIIIIIIDDDDDDDDNNNNNNNNEEEEEEEEEAAAAALLLLLLLLYYYYYYYYYYYYDDDDDDDDIIIIIIIICCCCCCMMMMMMMMRRRRRRRRRRRTTTTTTTLLLLLLLLKKKKKKKKKLLLLLLLLTTTTTTTNNNNNNNNPPPPPPPSSSSSSYYYYYYYYYYYYGGGGDDDDDDDDLLLLLLLLNNNNNNNNHHHHHHHHHHLLLLLLLLVVVVVVVSSSSSSAAAAAVVVVVVVMMMMMMMMSSSSSSGGGGVVVVVVVTTTTTTTTTTTTTTCCCCCCLLLLLLLLRRRRRRRRRRRFFFFFFFFFFFPPPPPPPGGGGQQQQQQQQQLLLLLLLLNNNNNNNNSSSSSSDDDDDDDDLLLLLLLLRRRRRRRRRRRKKKKKKKKKLLLLLLLLAAAAAVVVVVVVNNNNNNNNMMMMMMMMVVVVVVVPPPPPPPFFFFFFFFFFFPPPPPPPRRRRRRRRRRRLLLLLLLLHHHHHHHHHHFFFFFFFFFFFFFFFFFFFFFFMMMMMMMMVVVVVVVGGGGFFFFFFFFFFFAAAAAPPPPPPPLLLLLLLLTTTTTTTSSSSSSRRRRRRRRRRRGGGGAAAAAHHHHHHHHHHSSSSSSFFFFFFFFFFFRRRRRRRRRRRAAAAAVVVVVVVTTTTTTTVVVVVVVPPPPPPPEEEEEEEEELLLLLLLLTTTTTTTQQQQQQQQQQQQQQQQQQMMMMMMMMFFFFFFFFFFFDDDDDDDDPPPPPPPKKKKKKKKKNNNNNNNNMMMMMMMMMMMMMMMMAAAAAAAAAASSSSSSDDDDDDDDFFFFFFFFFFFRRRRRRRRRRRNNNNNNNNGGGGRRRRRRRRRRRYYYYYYYYYYYYLLLLLLLLTTTTTTTCCCCCCSSSSSSAAAAAIIIIIIIIFFFFFFFFFFFRRRRRRRRRRRGGGGKKKKKKKKKVVVVVVVSSSSSSMMMMMMMMKKKKKKKKKEEEEEEEEEVVVVVVVEEEEEEEEEDDDDDDDDQQQQQQQQQMMMMMMMMRRRRRRRRRRRNNNNNNNNVVVVVVVQQQQQQQQQNNNNNNNNKKKKKKKKKNNNNNNNNSSSSSSSSSSSSYYYYYYYYYYYYFFFFFFFFFFFVVVVVVVEEEEEEEEEWWWWWWWWWWWWWWIIIIIIIIPPPPPPPTTTTTTTNNNNNNNNVVVVVVVQQQQQQQQQTTTTTTTAAAAALLLLLLLLCCCCCCSSSSSSIIIIIIIIPPPPPPPPPPPPPPRRRRRRRRRRRGGGGLLLLLLLLKKKKKKKKKMMMMMMMMSSSSSSSSSSSSTTTTTTTFFFFFFFFFFFVVVVVVVGGGGNNNNNNNNSSSSSSTTTTTTTSSSSSSIIIIIIIIQQQQQQQQQEEEEEEEEELLLLLLLLFFFFFFFFFFFKKKKKKKKKRRRRRRRRRRRIIIIIIIIGGGGDDDDDDDDQQQQQQQQQFFFFFFFFFFFTTTTTTTRRRRRRRRRRRMMMMMMMMFFFFFFFFFFFRRRRRRRRRRRRRRRRRRRRRRKKKKKKKKKAAAAAFFFFFFFFFFFLLLLLLLLHHHHHHHHHHWWWWWWWWWWWWWWYYYYYYYYYYYYTTTTTTTGGGGEEEEEEEEEGGGGMMMMMMMMDDDDDDDDEEEEEEEEEMMMMMMMMEEEEEEEEEFFFFFFFFFFFTTTTTTTEEEEEEEEEAAAAAEEEEEEEEESSSSSSNNNNNNNNMMMMMMMMNNNNNNNNDDDDDDDDLLLLLLLLVVVVVVVSSSSSSEEEEEEEEEYYYYYYYYYYYYQQQQQQQQQQQQQQQQQQYYYYYYYYYYYYQQQQQQQQQDDDDDDDDAAAAASSSSSSIIIIIIIISSSSSSEEEEEEEEEGGGGEEEEEEEEEEEEEEEEEEEEEEEEEEEYYYYYYYYYYYYEEEEEEEEEEEEEEEEEEEEEEEEEEEAAAAAPPPPPPPMMMMMMMMEEEEEEEEEPPPPPPPEEEEEEEEEEEEEEEEEEE

SEQ ID NO: 247 - protein, 3504 aa, Schizophyllum commune
MMMMMMMMRRRRRRRRRRREEEEEEEEEIIIIIIIIVVVVVVVHHHHHHHHHHLLLLLLLLQQQQQQQQQTTTTTTTGGGGQQQQQQQQQCCCCCCGGGGNNNNNNNNQQQQQQQQQIIIIIIIIGGGGAAAAAKKKKKKKKKFFFFFFFFFFFWWWWWWWWWWWWWWEEEEEEEEEVVVVVVVVVVVVVVSSSSSSDDDDDDDDEEEEEEEEEHHHHHHHHHHGGGGIIIIIIIIEEEEEEEEEAAAAADDDDDDDDGGGGLLLLLLLLYYYYYYYYYYYYKKKKKKKKKGGGGTTTTTTTNNNNNNNNDDDDDDDDQQQQQQQQQQQQQQQQQQLLLLLLLLEEEEEEEEERRRRRRRRRRRIIIIIIIISSSSSSVVVVVVVYYYYYYYYYYYYYYYYYYYYYYYYNNNNNNNNEEEEEEEEEIIIIIIIIGGGGAAAAANNNNNNNNKKKKKKKKKYYYYYYYYYYYYVVVVVVVPPPPPPPRRRRRRRRRRRAAAAAIIIIIIIILLLLLLLLVVVVVVVDDDDDDDDLLLLLLLLEEEEEEEEEPPPPPPPGGGGTTTTTTTMMMMMMMMDDDDDDDDSSSSSSVVVVVVVRRRRRRRRRRRSSSSSSGGGGPPPPPPPLLLLLLLLGGGGGGGGLLLLLLLLFFFFFFFFFFFRRRRRRRRRRRPPPPPPPDDDDDDDDNNNNNNNNFFFFFFFFFFFVVVVVVVFFFFFFFFFFFGGGGQQQQQQQQQSSSSSSGGGGAAAAAGGGGNNNNNNNNNNNNNNNNWWWWWWWWWWWWWWAAAAAKKKKKKKKKGGGGHHHHHHHHHHYYYYYYYYYYYYTTTTTTTEEEEEEEEEGGGGAAAAAEEEEEEEEELLLLLLLLVVVVVVVDDDDDDDDAAAAAVVVVVVVLLLLLLLLDDDDDDDDVVVVVVVVVVVVVVRRRRRRRRRRRKKKKKKKKKEEEEEEEEEAAAAAEEEEEEEEEGGGGTTTTTTTDDDDDDDDCCCCCCLLLLLLLLQQQQQQQQQGGGGFFFFFFFFFFFQQQQQQQQQIIIIIIIITTTTTTTHHHHHHHHHHSSSSSSLLLLLLLLGGGGGGGGGGGGTTTTTTTGGGGAAAAAGGGGMMMMMMMMGGGGTTTTTTTLLLLLLLLLLLLLLLLIIIIIIIISSSSSSKKKKKKKKKIIIIIIIIRRRRRRRRRRREEEEEEEEEEEEEEEEEEYYYYYYYYYYYYPPPPPPPDDDDDDDDRRRRRRRRRRRMMMMMMMMMMMMMMMMCCCCCCTTTTTTTFFFFFFFFFFFSSSSSSVVVVVVVVVVVVVVPPPPPPPSSSSSSPPPPPPPKKKKKKKKKVVVVVVVSSSSSSDDDDDDDDTTTTTTTVVVVVVVVVVVVVVEEEEEEEEEPPPPPPPYYYYYYYYYYYYNNNNNNNNAAAAATTTTTTTLLLLLLLLSSSSSSVVVVVVVHHHHHHHHHHQQQQQQQQQLLLLLLLLVVVVVVVEEEEEEEEENNNNNNNNSSSSSSDDDDDDDDEEEEEEEEETTTTTTTFFFFFFFFFFFCCCCCCIIIIIIIIDDDDDDDDNNNNNNNNEEEEEEEEEAAAAALLLLLLLLYYYYYYYYYYYYDDDDDDDDIIIIIIIICCCCCCFFFFFFFFFFFRRRRRRRRRRRTTTTTTTLLLLLLLLKKKKKKKKKLLLLLLLLSSSSSSTTTTTTTPPPPPPPTTTTTTTYYYYYYYYYYYYGGGGDDDDDDDDLLLLLLLLNNNNNNNNHHHHHHHHHHLLLLLLLLVVVVVVVSSSSSSFFFFFFFFFFFVVVVVVVMMMMMMMMSSSSSSGGGGIIIIIIIITTTTTTTTTTTTTTSSSSSSLLLLLLLLRRRRRRRRRRRFFFFFFFFFFFPPPPPPPGGGGQQQQQQQQQLLLLLLLLNNNNNNNNSSSSSSDDDDDDDDLLLLLLLLRRRRRRRRRRRKKKKKKKKKLLLLLLLLAAAAAVVVVVVVNNNNNNNNLLLLLLLLVVVVVVVPPPPPPPFFFFFFFFFFFPPPPPPPRRRRRRRRRRRLLLLLLLLHHHHHHHHHHFFFFFFFFFFFFFFFFFFFFFFMMMMMMMMTTTTTTTGGGGFFFFFFFFFFFAAAAAPPPPPPPLLLLLLLLTTTTTTTAAAAARRRRRRRRRRRGGGGSSSSSSQQQQQQQQQQQQQQQQQQYYYYYYYYYYYYRRRRRRRRRRRAAAAAVVVVVVVTTTTTTTVVVVVVVPPPPPPPEEEEEEEEELLLLLLLLTTTTTTTQQQQQQQQQQQQQQQQQQMMMMMMMMFFFFFFFFFFFDDDDDDDDAAAAAKKKKKKKKKNNNNNNNNMMMMMMMMMMMMMMMMAAAAAAAAAASSSSSSDDDDDDDDPPPPPPPRRRRRRRRRRRHHHHHHHHHHGGGGRRRRRRRRRRRYYYYYYYYYYYYLLLLLLLLTTTTTTTVVVVVVVAAAAAAAAAAMMMMMMMMFFFFFFFFFFFRRRRRRRRRRRGGGGKKKKKKKKKVVVVVVVSSSSSSMMMMMMMMKKKKKKKKKEEEEEEEEEVVVVVVVEEEEEEEEEEEEEEEEEEQQQQQQQQQMMMMMMMMQQQQQQQQQNNNNNNNNVVVVVVVQQQQQQQQQNNNNNNNNKKKKKKKKKNNNNNNNNSSSSSSAAAAAYYYYYYYYYYYYFFFFFFFFFFFVVVVVVVEEEEEEEEEWWWWWWWWWWWWWWIIIIIIIIPPPPPPPNNNNNNNNNNNNNNNNVVVVVVVLLLLLLLLAAAAASSSSSSQQQQQQQQQCCCCCCDDDDDDDDIIIIIIIIAAAAAPPPPPPPRRRRRRRRRRRGGGGLLLLLLLLRRRRRRRRRRRMMMMMMMMSSSSSSVVVVVVVTTTTTTTFFFFFFFFFFFLLLLLLLLGGGGNNNNNNNNSSSSSSTTTTTTTAAAAAIIIIIIIIQQQQQQQQQEEEEEEEEELLLLLLLLFFFFFFFFFFFKKKKKKKKKRRRRRRRRRRRVVVVVVVSSSSSSDDDDDDDDQQQQQQQQQFFFFFFFFFFFTTTTTTTAAAAAMMMMMMMMFFFFFFFFFFFKKKKKKKKKRRRRRRRRRRRKKKKKKKKKAAAAAFFFFFFFFFFFLLLLLLLLHHHHHHHHHHWWWWWWWWWWWWWWYYYYYYYYYYYYTTTTTTTQQQQQQQQQEEEEEEEEEGGGGMMMMMMMMDDDDDDDDEEEEEEEEEMMMMMMMMEEEEEEEEEFFFFFFFFFFFTTTTTTTEEEEEEEEEAAAAAEEEEEEEEESSSSSSNNNNNNNNMMMMMMMMQQQQQQQQQDDDDDDDDLLLLLLLLVVVVVVVAAAAAEEEEEEEEEYYYYYYYYYYYYQQQQQQQQQQQQQQQQQQYYYYYYYYYYYYQQQQQQQQQDDDDDDDDAAAAATTTTTTTVVVVVVVEEEEEEEEEEEEEEEEEEEEEEEEEEEGGGGEEEEEEEEEYYYYYYYYYYYYEEEEEEEEEEEEEEEEEEEEEEEEEEEVVVVVVVIIIIIIIIEEEEEEEEEDDDDDDDDQQQQQQQQQEEEEEEEEEE

SEQ ID NO: 248 - protein, 3476 aa, Schizosaccharomyces pombe
MMMMMMMMRRRRRRRRRRREEEEEEEEEIIIIIIIIVVVVVVVHHHHHHHHHHIIIIIIIIQQQQQQQQQAAAAAGGGGQQQQQQQQQCCCCCCGGGGNNNNNNNNQQQQQQQQQVVVVVVVGGGGAAAAAAAAAAFFFFFFFFFFFWWWWWWWWWWWWWWSSSSSSTTTTTTTIIIIIIIIAAAAADDDDDDDDEEEEEEEEEHHHHHHHHHHGGGGLLLLLLLLDDDDDDDDSSSSSSAAAAAGGGGIIIIIIIIYYYYYYYYYYYYHHHHHHHHHHGGGGTTTTTTTSSSSSSEEEEEEEEEAAAAAQQQQQQQQQHHHHHHHHHHEEEEEEEEERRRRRRRRRRRLLLLLLLLNNNNNNNNVVVVVVVYYYYYYYYYYYYFFFFFFFFFFFNNNNNNNNEEEEEEEEEAAAAAAAAAAGGGGGGGGKKKKKKKKKYYYYYYYYYYYYVVVVVVVPPPPPPPRRRRRRRRRRRAAAAAVVVVVVVLLLLLLLLVVVVVVVDDDDDDDDLLLLLLLLEEEEEEEEEPPPPPPPGGGGTTTTTTTMMMMMMMMDDDDDDDDAAAAAVVVVVVVKKKKKKKKKSSSSSSGGGGKKKKKKKKKFFFFFFFFFFFGGGGNNNNNNNNLLLLLLLLFFFFFFFFFFFRRRRRRRRRRRPPPPPPPDDDDDDDDNNNNNNNNIIIIIIIIIIIIIIIIYYYYYYYYYYYYGGGGQQQQQQQQQSSSSSSGGGGAAAAAGGGGNNNNNNNNIIIIIIIIWWWWWWWWWWWWWWAAAAAKKKKKKKKKGGGGHHHHHHHHHHYYYYYYYYYYYYTTTTTTTEEEEEEEEEGGGGAAAAAEEEEEEEEELLLLLLLLAAAAADDDDDDDDAAAAAVVVVVVVLLLLLLLLDDDDDDDDVVVVVVVVVVVVVVRRRRRRRRRRRRRRRRRRRRRREEEEEEEEEAAAAAEEEEEEEEEAAAAACCCCCCDDDDDDDDAAAAALLLLLLLLQQQQQQQQQGGGGFFFFFFFFFFFQQQQQQQQQLLLLLLLLTTTTTTTHHHHHHHHHHSSSSSSLLLLLLLLGGGGGGGGGGGGTTTTTTTGGGGSSSSSSGGGGMMMMMMMMGGGGTTTTTTTLLLLLLLLLLLLLLLLLLLLLLLLSSSSSSKKKKKKKKKIIIIIIIIRRRRRRRRRRREEEEEEEEEEEEEEEEEEYYYYYYYYYYYYPPPPPPPDDDDDDDDRRRRRRRRRRRMMMMMMMMMMMMMMMMAAAAATTTTTTTFFFFFFFFFFFSSSSSSVVVVVVVAAAAAPPPPPPPAAAAAPPPPPPPKKKKKKKKKSSSSSSSSSSSSDDDDDDDDTTTTTTTVVVVVVVVVVVVVVEEEEEEEEEPPPPPPPYYYYYYYYYYYYNNNNNNNNAAAAATTTTTTTLLLLLLLLSSSSSSMMMMMMMMHHHHHHHHHHQQQQQQQQQLLLLLLLLVVVVVVVEEEEEEEEENNNNNNNNSSSSSSDDDDDDDDEEEEEEEEETTTTTTTFFFFFFFFFFFCCCCCCIIIIIIIIDDDDDDDDNNNNNNNNEEEEEEEEEAAAAALLLLLLLLSSSSSSSSSSSSIIIIIIIIFFFFFFFFFFFAAAAANNNNNNNNTTTTTTTLLLLLLLLKKKKKKKKKIIIIIIIIKKKKKKKKKSSSSSSPPPPPPPSSSSSSYYYYYYYYYYYYDDDDDDDDDDDDDDDDLLLLLLLLNNNNNNNNHHHHHHHHHHLLLLLLLLVVVVVVVSSSSSSAAAAAVVVVVVVMMMMMMMMAAAAAGGGGVVVVVVVTTTTTTTTTTTTTTSSSSSSFFFFFFFFFFFRRRRRRRRRRRFFFFFFFFFFFPPPPPPPGGGGEEEEEEEEELLLLLLLLNNNNNNNNSSSSSSDDDDDDDDLLLLLLLLRRRRRRRRRRRKKKKKKKKKLLLLLLLLAAAAAVVVVVVVNNNNNNNNMMMMMMMMVVVVVVVPPPPPPPFFFFFFFFFFFPPPPPPPRRRRRRRRRRRLLLLLLLLHHHHHHHHHHFFFFFFFFFFFFFFFFFFFFFFMMMMMMMMVVVVVVVGGGGFFFFFFFFFFFAAAAAPPPPPPPLLLLLLLLAAAAAAAAAAIIIIIIIIGGGGSSSSSSSSSSSSSSSSSSFFFFFFFFFFFQQQQQQQQQAAAAAVVVVVVVSSSSSSVVVVVVVPPPPPPPEEEEEEEEELLLLLLLLTTTTTTTQQQQQQQQQQQQQQQQQQMMMMMMMMFFFFFFFFFFFDDDDDDDDAAAAANNNNNNNNNNNNNNNNMMMMMMMMMMMMMMMMVVVVVVVAAAAAAAAAADDDDDDDDPPPPPPPRRRRRRRRRRRHHHHHHHHHHGGGGRRRRRRRRRRRYYYYYYYYYYYYLLLLLLLLTTTTTTTVVVVVVVAAAAAAAAAALLLLLLLLFFFFFFFFFFFRRRRRRRRRRRGGGGKKKKKKKKKVVVVVVVSSSSSSMMMMMMMMKKKKKKKKKEEEEEEEEEVVVVVVVDDDDDDDDEEEEEEEEEQQQQQQQQQIIIIIIIIRRRRRRRRRRRSSSSSSVVVVVVVQQQQQQQQQTTTTTTTKKKKKKKKKNNNNNNNNSSSSSSAAAAAYYYYYYYYYYYYFFFFFFFFFFFVVVVVVVEEEEEEEEEWWWWWWWWWWWWWWIIIIIIIIPPPPPPPDDDDDDDDNNNNNNNNVVVVVVVLLLLLLLLKKKKKKKKKAAAAAVVVVVVVCCCCCCSSSSSSVVVVVVVPPPPPPPPPPPPPPKKKKKKKKKDDDDDDDDLLLLLLLLKKKKKKKKKMMMMMMMMSSSSSSAAAAATTTTTTTFFFFFFFFFFFIIIIIIIIGGGGNNNNNNNNSSSSSSTTTTTTTSSSSSSIIIIIIIIQQQQQQQQQEEEEEEEEEIIIIIIIIFFFFFFFFFFFRRRRRRRRRRRRRRRRRRRRRRLLLLLLLLGGGGDDDDDDDDQQQQQQQQQFFFFFFFFFFFSSSSSSAAAAAMMMMMMMMFFFFFFFFFFFRRRRRRRRRRRRRRRRRRRRRRKKKKKKKKKAAAAAFFFFFFFFFFFLLLLLLLLHHHHHHHHHHWWWWWWWWWWWWWWYYYYYYYYYYYYTTTTTTTGGGGEEEEEEEEEGGGGMMMMMMMMDDDDDDDDEEEEEEEEEMMMMMMMMEEEEEEEEEFFFFFFFFFFFTTTTTTTEEEEEEEEEAAAAAEEEEEEEEESSSSSSNNNNNNNNMMMMMMMMNNNNNNNNDDDDDDDDLLLLLLLLVVVVVVVSSSSSSEEEEEEEEEYYYYYYYYYYYYQQQQQQQQQQQQQQQQQQYYYYYYYYYYYYQQQQQQQQQEEEEEEEEEAAAAAGGGGIIIIIIIIDDDDDDDDEEEEEEEEEGGGGDDDDDDDDEEEEEEEEEDDDDDDDDYYYYYYYYYYYYEEEEEEEEEIIIIIIIIEEEEEEEEEEEEEEEEEEEEEEEEEEEKKKKKKKKKEEEEEEEEEPPPPPPPLLLLLLLLEEEEEEEEEYYYYYYYYYYYYY

SEQ ID NO: 249 - protein, 2336 aa, Strongylocentrotus purpuratus
RRRRRRRRRRREEEEEEEEEEEEEEEEEEYYYYYYYYYYYYPPPPPPPDDDDDDDDRRRRRRRRRRRIIIIIIIIMMMMMMMMNNNNNNNNTTTTTTTFFFFFFFFFFFSSSSSSVVVVVVVVVVVVVVPPPPPPPSSSSSSPPPPPPPKKKKKKKKKVVVVVVVSSSSSSDDDDDDDDTTTTTTTVVVVVVVVVVVVVVEEEEEEEEEPPPPPPPYYYYYYYYYYYYNNNNNNNNAAAAATTTTTTTLLLLLLLLSSSSSSVVVVVVVHHHHHHHHHHQQQQQQQQQLLLLLLLLVVVVVVVEEEEEEEEENNNNNNNNTTTTTTTDDDDDDDDEEEEEEEEETTTTTTTYYYYYYYYYYYYCCCCCCIIIIIIIIDDDDDDDDNNNNNNNNEEEEEEEEEAAAAALLLLLLLLYYYYYYYYYYYYDDDDDDDDIIIIIIIICCCCCCFFFFFFFFFFFRRRRRRRRRRRTTTTTTTLLLLLLLLKKKKKKKKKLLLLLLLLTTTTTTTTTTTTTTPPPPPPPTTTTTTTYYYYYYYYYYYYGGGGDDDDDDDDLLLLLLLLNNNNNNNNHHHHHHHHHHLLLLLLLLVVVVVVVSSSSSSAAAAATTTTTTTMMMMMMMMSSSSSSGGGGVVVVVVVTTTTTTTTTTTTTTCCCCCCLLLLLLLLRRRRRRRRRRRFFFFFFFFFFFPPPPPPPGGGGQQQQQQQQQLLLLLLLLNNNNNNNNAAAAADDDDDDDDLLLLLLLLRRRRRRRRRRRKKKKKKKKKLLLLLLLLAAAAAVVVVVVVNNNNNNNNMMMMMMMMVVVVVVVPPPPPPPFFFFFFFFFFFPPPPPPPRRRRRRRRRRRLLLLLLLLHHHHHHHHHHFFFFFFFFFFFFFFFFFFFFFFMMMMMMMMPPPPPPPGGGGFFFFFFFFFFFAAAAAPPPPPPPLLLLLLLLTTTTTTTSSSSSSRRRRRRRRRRRGGGGSSSSSSQQQQQQQQQQQQQQQQQQYYYYYYYYYYYYRRRRRRRRRRRAAAAALLLLLLLLTTTTTTTVVVVVVVPPPPPPPEEEEEEEEELLLLLLLLTTTTTTTQQQQQQQQQQQQQQQQQQMMMMMMMMFFFFFFFFFFFDDDDDDDDAAAAAKKKKKKKKKNNNNNNNNMMMMMMMMMMMMMMMMAAAAAAAAAACCCCCCDDDDDDDDPPPPPPPRRRRRRRRRRRHHHHHHHHHHGGGGRRRRRRRRRRRYYYYYYYYYYYYLLLLLLLLTTTTTTTVVVVVVVAAAAAAAAAAIIIIIIIIFFFFFFFFFFFRRRRRRRRRRRGGGGRRRRRRRRRRRMMMMMMMMSSSSSSMMMMMMMMKKKKKKKKKEEEEEEEEEVVVVVVVDDDDDDDDEEEEEEEEEQQQQQQQQQMMMMMMMMLLLLLLLLNNNNNNNNVVVVVVVQQQQQQQQQNNNNNNNNKKKKKKKKKNNNNNNNNSSSSSSSSSSSSYYYYYYYYYYYYFFFFFFFFFFFVVVVVVVEEEEEEEEEWWWWWWWWWWWWWWIIIIIIIIPPPPPPPNNNNNNNNNNNNNNNNVVVVVVVKKKKKKKKKTTTTTTTAAAAAVVVVVVVCCCCCCDDDDDDDDIIIIIIIIPPPPPPPPPPPPPPRRRRRRRRRRRGGGGLLLLLLLLKKKKKKKKKMMMMMMMMSSSSSSAAAAATTTTTTTFFFFFFFFFFFIIIIIIIIGGGGNNNNNNNNSSSSSSTTTTTTTAAAAAIIIIIIIIQQQQQQQQQEEEEEEEEELLLLLLLLFFFFFFFFFFFKKKKKKKKKRRRRRRRRRRRIIIIIIIISSSSSSEEEEEEEEEQQQQQQQQQFFFFFFFFFFFTTTTTTTAAAAAMMMMMMMMFFFFFFFFFFFRRRRRRRRRRRRRRRRRRRRRRKKKKKKKKKAAAAAFFFFFFFFFFFLLLLLLLLHHHHHHHHHHWWWWWWWWWWWWWWYYYYYYYYYYYYTTTTTTTGGGGEEEEEEEEEGGGGMMMMMMMMDDDDDDDDEEEEEEEEEMMMMMMMMEEEEEEEEEFFFFFFFFFFFTTTTTTTEEEEEEEEEAAAAAEEEEEEEEESSSSSSNNNNNNNNMMMMMMMMNNNNNNNNDDDDDDDDLLLLLLLLVVVVVVVSSSSSSEEEEEEEEEYYYYYYYYYYYYQQQQQQQQQQQQQQQQQQYYYYYYYYYYYYQQQQQQQQQDDDDDDDDAAAAATTTTTTTAAAAAEEEEEEEEEEEEEEEEEEEEEEEEEEEGGGGEEEEEEEEEFFFFFFFFFFFDDDDDDDDEEEEEEEEEEEEEEEEEEEEEEEEEEEEEEEEEEEEGGGGDDDDDDDDEEEEEEEEEEEEEEEEEEAAAAAAAAAAA

SEQ ID NO: 250 - protein, 3463 aa, Stylonychia lemnae
MMMMMMMMRRRRRRRRRRREEEEEEEEEIIIIIIIIVVVVVVVHHHHHHHHHHIIIIIIIIQQQQQQQQQGGGGGGGGQQQQQQQQQCCCCCCGGGGNNNNNNNNQQQQQQQQQIIIIIIIIGGGGAAAAAKKKKKKKKKFFFFFFFFFFFWWWWWWWWWWWWWWEEEEEEEEEVVVVVVVIIIIIIIISSSSSSDDDDDDDDEEEEEEEEEHHHHHHHHHHGGGGIIIIIIIIDDDDDDDDPPPPPPPTTTTTTTGGGGTTTTTTTYYYYYYYYYYYYHHHHHHHHHHGGGGDDDDDDDDSSSSSSDDDDDDDDLLLLLLLLQQQQQQQQQLLLLLLLLEEEEEEEEERRRRRRRRRRRIIIIIIIINNNNNNNNVVVVVVVYYYYYYYYYYYYYYYYYYYYYYYYNNNNNNNNEEEEEEEEEAAAAATTTTTTTGGGGGGGGRRRRRRRRRRRYYYYYYYYYYYYVVVVVVVPPPPPPPRRRRRRRRRRRAAAAAVVVVVVVLLLLLLLLMMMMMMMMDDDDDDDDLLLLLLLLEEEEEEEEEPPPPPPPGGGGTTTTTTTMMMMMMMMDDDDDDDDSSSSSSVVVVVVVRRRRRRRRRRRAAAAAGGGGPPPPPPPFFFFFFFFFFFGGGGQQQQQQQQQLLLLLLLLFFFFFFFFFFFRRRRRRRRRRRPPPPPPPDDDDDDDDNNNNNNNNFFFFFFFFFFFVVVVVVVFFFFFFFFFFFGGGGQQQQQQQQQSSSSSSGGGGAAAAAGGGGNNNNNNNNNNNNNNNNWWWWWWWWWWWWWWAAAAAKKKKKKKKKGGGGHHHHHHHHHHYYYYYYYYYYYYTTTTTTTEEEEEEEEEGGGGAAAAAEEEEEEEEELLLLLLLLIIIIIIIIDDDDDDDDSSSSSSVVVVVVVLLLLLLLLDDDDDDDDVVVVVVVVVVVVVVRRRRRRRRRRRKKKKKKKKKEEEEEEEEEAAAAAEEEEEEEEEGGGGCCCCCCDDDDDDDDCCCCCCLLLLLLLLQQQQQQQQQGGGGFFFFFFFFFFFQQQQQQQQQIIIIIIIITTTTTTTHHHHHHHHHHSSSSSSLLLLLLLLGGGGGGGGGGGGTTTTTTTGGGGSSSSSSGGGGMMMMMMMMGGGGTTTTTTTLLLLLLLLLLLLLLLLIIIIIIIISSSSSSKKKKKKKKKVVVVVVVRRRRRRRRRRREEEEEEEEEEEEEEEEEEYYYYYYYYYYYYPPPPPPPDDDDDDDDRRRRRRRRRRRIIIIIIIIMMMMMMMMAAAAATTTTTTTFFFFFFFFFFFSSSSSSVVVVVVVVVVVVVVPPPPPPPSSSSSSPPPPPPPKKKKKKKKKVVVVVVVSSSSSSDDDDDDDDTTTTTTTVVVVVVVVVVVVVVEEEEEEEEEPPPPPPPYYYYYYYYYYYYNNNNNNNNAAAAATTTTTTTLLLLLLLLSSSSSSVVVVVVVHHHHHHHHHHQQQQQQQQQLLLLLLLLVVVVVVVEEEEEEEEENNNNNNNNAAAAADDDDDDDDEEEEEEEEEVVVVVVVMMMMMMMMCCCCCCIIIIIIIIDDDDDDDDNNNNNNNNEEEEEEEEEAAAAALLLLLLLLYYYYYYYYYYYYDDDDDDDDIIIIIIIICCCCCCFFFFFFFFFFFRRRRRRRRRRRTTTTTTTLLLLLLLLKKKKKKKKKLLLLLLLLTTTTTTTTTTTTTTPPPPPPPTTTTTTTYYYYYYYYYYYYGGGGDDDDDDDDLLLLLLLLNNNNNNNNHHHHHHHHHHLLLLLLLLVVVVVVVSSSSSSAAAAAGGGGIIIIIIIISSSSSSGGGGVVVVVVVTTTTTTTCCCCCCCCCCCCLLLLLLLLRRRRRRRRRRRFFFFFFFFFFFPPPPPPPGGGGQQQQQQQQQLLLLLLLLNNNNNNNNSSSSSSDDDDDDDDLLLLLLLLRRRRRRRRRRRKKKKKKKKKLLLLLLLLAAAAAVVVVVVVNNNNNNNNLLLLLLLLIIIIIIIIPPPPPPPFFFFFFFFFFFPPPPPPPRRRRRRRRRRRLLLLLLLLHHHHHHHHHHFFFFFFFFFFFFFFFFFFFFFFMMMMMMMMTTTTTTTGGGGFFFFFFFFFFFAAAAAPPPPPPPLLLLLLLLTTTTTTTSSSSSSRRRRRRRRRRRGGGGSSSSSSQQQQQQQQQQQQQQQQQQYYYYYYYYYYYYRRRRRRRRRRRAAAAALLLLLLLLTTTTTTTVVVVVVVPPPPPPPEEEEEEEEELLLLLLLLTTTTTTTQQQQQQQQQQQQQQQQQQMMMMMMMMFFFFFFFFFFFDDDDDDDDAAAAAKKKKKKKKKNNNNNNNNMMMMMMMMMMMMMMMMCCCCCCAAAAASSSSSSDDDDDDDDPPPPPPPRRRRRRRRRRRHHHHHHHHHHGGGGRRRRRRRRRRRYYYYYYYYYYYYLLLLLLLLTTTTTTTAAAAASSSSSSAAAAALLLLLLLLFFFFFFFFFFFRRRRRRRRRRRGGGGRRRRRRRRRRRMMMMMMMMSSSSSSTTTTTTTKKKKKKKKKEEEEEEEEEVVVVVVVDDDDDDDDEEEEEEEEEQQQQQQQQQMMMMMMMMLLLLLLLLNNNNNNNNVVVVVVVQQQQQQQQQNNNNNNNNKKKKKKKKKNNNNNNNNSSSSSSSSSSSSYYYYYYYYYYYYFFFFFFFFFFFVVVVVVVEEEEEEEEEWWWWWWWWWWWWWWIIIIIIIIPPPPPPPNNNNNNNNNNNNNNNNIIIIIIIIKKKKKKKKKSSSSSSSSSSSSVVVVVVVCCCCCCDDDDDDDDIIIIIIIIPPPPPPPPPPPPPPKKKKKKKKKGGGGLLLLLLLLKKKKKKKKKMMMMMMMMAAAAAVVVVVVVTTTTTTTFFFFFFFFFFFLLLLLLLLGGGGNNNNNNNNSSSSSSTTTTTTTAAAAAIIIIIIIIQQQQQQQQQEEEEEEEEEMMMMMMMMFFFFFFFFFFFKKKKKKKKKRRRRRRRRRRRVVVVVVVGGGGEEEEEEEEEQQQQQQQQQFFFFFFFFFFFTTTTTTTAAAAAMMMMMMMMFFFFFFFFFFFRRRRRRRRRRRRRRRRRRRRRRKKKKKKKKKAAAAAFFFFFFFFFFFLLLLLLLLHHHHHHHHHHWWWWWWWWWWWWWWYYYYYYYYYYYYTTTTTTTGGGGEEEEEEEEEGGGGMMMMMMMMDDDDDDDDEEEEEEEEEMMMMMMMMEEEEEEEEEFFFFFFFFFFFTTTTTTTEEEEEEEEEAAAAAEEEEEEEEESSSSSSNNNNNNNNMMMMMMMMNNNNNNNNDDDDDDDDLLLLLLLLVVVVVVVSSSSSSEEEEEEEEEYYYYYYYYYYYYQQQQQQQQQQQQQQQQQQYYYYYYYYYYYYQQQQQQQQQDDDDDDDDAAAAATTTTTTTAAAAAEEEEEEEEEDDDDDDDDEEEEEEEEEEEEEEEEEEEEEEEEEEEMMMMMMMMDDDDDDDDEEEEEEEEEEEEEEEEEEQQQQQQQQQMMMMMMMMEEEEEEEEEE

SEQ ID NO: 251 - protein, 3475 aa, Tetrahymena pyriformis
MMMMMMMMRRRRRRRRRRREEEEEEEEEIIIIIIIIVVVVVVVHHHHHHHHHHIIIIIIIIQQQQQQQQQGGGGGGGGQQQQQQQQQCCCCCCGGGGNNNNNNNNQQQQQQQQQIIIIIIIIGGGGAAAAAKKKKKKKKKFFFFFFFFFFFWWWWWWWWWWWWWWEEEEEEEEEVVVVVVVIIIIIIIISSSSSSDDDDDDDDEEEEEEEEEHHHHHHHHHHGGGGIIIIIIIIDDDDDDDDPPPPPPPTTTTTTTGGGGTTTTTTTYYYYYYYYYYYYHHHHHHHHHHGGGGDDDDDDDDSSSSSSDDDDDDDDLLLLLLLLQQQQQQQQQLLLLLLLLEEEEEEEEERRRRRRRRRRRIIIIIIIINNNNNNNNVVVVVVVYYYYYYYYYYYYYYYYYYYYYYYYNNNNNNNNEEEEEEEEEAAAAATTTTTTTGGGGGGGGRRRRRRRRRRRYYYYYYYYYYYYVVVVVVVPPPPPPPRRRRRRRRRRRAAAAAIIIIIIIILLLLLLLLMMMMMMMMDDDDDDDDLLLLLLLLEEEEEEEEEPPPPPPPGGGGTTTTTTTMMMMMMMMDDDDDDDDSSSSSSVVVVVVVRRRRRRRRRRRAAAAAGGGGPPPPPPPFFFFFFFFFFFGGGGQQQQQQQQQLLLLLLLLFFFFFFFFFFFRRRRRRRRRRRPPPPPPPDDDDDDDDNNNNNNNNFFFFFFFFFFFVVVVVVVFFFFFFFFFFFGGGGQQQQQQQQQTTTTTTTGGGGAAAAAGGGGNNNNNNNNNNNNNNNNWWWWWWWWWWWWWWAAAAAKKKKKKKKKGGGGHHHHHHHHHHYYYYYYYYYYYYTTTTTTTEEEEEEEEEGGGGAAAAAEEEEEEEEELLLLLLLLIIIIIIIIDDDDDDDDSSSSSSVVVVVVVLLLLLLLLDDDDDDDDVVVVVVVVVVVVVVRRRRRRRRRRRKKKKKKKKKEEEEEEEEEAAAAAEEEEEEEEEGGGGCCCCCCDDDDDDDDCCCCCCLLLLLLLLQQQQQQQQQGGGGFFFFFFFFFFFQQQQQQQQQIIIIIIIITTTTTTTHHHHHHHHHHSSSSSSLLLLLLLLGGGGGGGGGGGGTTTTTTTGGGGSSSSSSGGGGMMMMMMMMGGGGTTTTTTTLLLLLLLLLLLLLLLLIIIIIIIISSSSSSKKKKKKKKKVVVVVVVRRRRRRRRRRREEEEEEEEEEEEEEEEEEYYYYYYYYYYYYPPPPPPPDDDDDDDDRRRRRRRRRRRIIIIIIIIMMMMMMMMEEEEEEEEETTTTTTTFFFFFFFFFFFSSSSSSVVVVVVVVVVVVVVPPPPPPPSSSSSSPPPPPPPKKKKKKKKKVVVVVVVSSSSSSDDDDDDDDTTTTTTTVVVVVVVVVVVVVVEEEEEEEEEPPPPPPPYYYYYYYYYYYYNNNNNNNNAAAAATTTTTTTLLLLLLLLSSSSSSVVVVVVVHHHHHHHHHHQQQQQQQQQLLLLLLLLVVVVVVVEEEEEEEEENNNNNNNNAAAAADDDDDDDDEEEEEEEEECCCCCCMMMMMMMMVVVVVVVIIIIIIIIDDDDDDDDNNNNNNNNEEEEEEEEEAAAAALLLLLLLLYYYYYYYYYYYYDDDDDDDDIIIIIIIICCCCCCFFFFFFFFFFFRRRRRRRRRRRTTTTTTTLLLLLLLLKKKKKKKKKLLLLLLLLTTTTTTTTTTTTTTPPPPPPPTTTTTTTYYYYYYYYYYYYGGGGNNNNNNNNLLLLLLLLNNNNNNNNHHHHHHHHHHLLLLLLLLVVVVVVVSSSSSSAAAAAAAAAAMMMMMMMMSSSSSSGGGGVVVVVVVTTTTTTTCCCCCCCCCCCCLLLLLLLLRRRRRRRRRRRFFFFFFFFFFFPPPPPPPGGGGQQQQQQQQQLLLLLLLLNNNNNNNNSSSSSSDDDDDDDDLLLLLLLLRRRRRRRRRRRKKKKKKKKKLLLLLLLLAAAAAVVVVVVVNNNNNNNNLLLLLLLLIIIIIIIIPPPPPPPFFFFFFFFFFFPPPPPPPRRRRRRRRRRRLLLLLLLLHHHHHHHHHHFFFFFFFFFFFFFFFFFFFFFFMMMMMMMMIIIIIIIIGGGGFFFFFFFFFFFAAAAAPPPPPPPLLLLLLLLTTTTTTTSSSSSSRRRRRRRRRRRGGGGSSSSSSQQQQQQQQQQQQQQQQQQYYYYYYYYYYYYRRRRRRRRRRRAAAAALLLLLLLLTTTTTTTVVVVVVVPPPPPPPEEEEEEEEELLLLLLLLTTTTTTTQQQQQQQQQQQQQQQQQQMMMMMMMMFFFFFFFFFFFDDDDDDDDAAAAAKKKKKKKKKNNNNNNNNMMMMMMMMMMMMMMMMCCCCCCAAAAAAAAAADDDDDDDDPPPPPPPRRRRRRRRRRRHHHHHHHHHHGGGGRRRRRRRRRRRYYYYYYYYYYYYLLLLLLLLTTTTTTTAAAAASSSSSSAAAAALLLLLLLLFFFFFFFFFFFRRRRRRRRRRRGGGGRRRRRRRRRRRMMMMMMMMSSSSSSTTTTTTTKKKKKKKKKEEEEEEEEEVVVVVVVDDDDDDDDEEEEEEEEEQQQQQQQQQMMMMMMMMLLLLLLLLNNNNNNNNVVVVVVVQQQQQQQQQNNNNNNNNKKKKKKKKKNNNNNNNNSSSSSSSSSSSSYYYYYYYYYYYYFFFFFFFFFFFVVVVVVVEEEEEEEEEWWWWWWWWWWWWWWIIIIIIIIPPPPPPPNNNNNNNNNNNNNNNNIIIIIIIIKKKKKKKKKSSSSSSSSSSSSIIIIIIIICCCCCCDDDDDDDDIIIIIIIIPPPPPPPPPPPPPPKKKKKKKKKGGGGLLLLLLLLKKKKKKKKKMMMMMMMMAAAAAVVVVVVVTTTTTTTFFFFFFFFFFFVVVVVVVGGGGNNNNNNNNSSSSSSTTTTTTTAAAAAIIIIIIIIQQQQQQQQQEEEEEEEEEMMMMMMMMFFFFFFFFFFFKKKKKKKKKRRRRRRRRRRRVVVVVVVAAAAAEEEEEEEEEQQQQQQQQQFFFFFFFFFFFTTTTTTTAAAAAMMMMMMMMFFFFFFFFFFFRRRRRRRRRRRRRRRRRRRRRRKKKKKKKKKAAAAAFFFFFFFFFFFLLLLLLLLHHHHHHHHHHWWWWWWWWWWWWWWYYYYYYYYYYYYTTTTTTTGGGGEEEEEEEEEGGGGMMMMMMMMDDDDDDDDEEEEEEEEEMMMMMMMMEEEEEEEEEFFFFFFFFFFFTTTTTTTEEEEEEEEEAAAAAEEEEEEEEESSSSSSNNNNNNNNMMMMMMMMNNNNNNNNDDDDDDDDLLLLLLLLVVVVVVVSSSSSSEEEEEEEEEYYYYYYYYYYYYQQQQQQQQQQQQQQQQQQYYYYYYYYYYYYQQQQQQQQQDDDDDDDDAAAAATTTTTTTAAAAAEEEEEEEEEEEEEEEEEEEEEEEEEEEGGGGEEEEEEEEEFFFFFFFFFFFEEEEEEEEEEEEEEEEEEEEEEEEEEEEEEEEEEEEGGGGEEEEEEEEENNNNNNNNN

SEQ ID NO: 252 - protein, 3475 aa, Tetrahymena thermophila
MMMMMMMMRRRRRRRRRRREEEEEEEEEIIIIIIIIVVVVVVVHHHHHHHHHHIIIIIIIIQQQQQQQQQGGGGGGGGQQQQQQQQQCCCCCCGGGGNNNNNNNNQQQQQQQQQIIIIIIIIGGGGAAAAAKKKKKKKKKFFFFFFFFFFFWWWWWWWWWWWWWWEEEEEEEEEVVVVVVVIIIIIIIISSSSSSDDDDDDDDEEEEEEEEEHHHHHHHHHHGGGGIIIIIIIIDDDDDDDDPPPPPPPTTTTTTTGGGGTTTTTTTYYYYYYYYYYYYHHHHHHHHHHGGGGDDDDDDDDSSSSSSDDDDDDDDLLLLLLLLQQQQQQQQQLLLLLLLLEEEEEEEEERRRRRRRRRRRIIIIIIIINNNNNNNNVVVVVVVYYYYYYYYYYYYYYYYYYYYYYYYNNNNNNNNEEEEEEEEEAAAAATTTTTTTGGGGGGGGRRRRRRRRRRRYYYYYYYYYYYYVVVVVVVPPPPPPPRRRRRRRRRRRAAAAAIIIIIIIILLLLLLLLMMMMMMMMDDDDDDDDLLLLLLLLEEEEEEEEEPPPPPPPGGGGTTTTTTTMMMMMMMMDDDDDDDDSSSSSSVVVVVVVRRRRRRRRRRRAAAAAGGGGPPPPPPPFFFFFFFFFFFGGGGQQQQQQQQQLLLLLLLLFFFFFFFFFFFRRRRRRRRRRRPPPPPPPDDDDDDDDNNNNNNNNFFFFFFFFFFFVVVVVVVFFFFFFFFFFFGGGGQQQQQQQQQTTTTTTTGGGGAAAAAGGGGNNNNNNNNNNNNNNNNWWWWWWWWWWWWWWAAAAAKKKKKKKKKGGGGHHHHHHHHHHYYYYYYYYYYYYTTTTTTTEEEEEEEEEGGGGAAAAAEEEEEEEEELLLLLLLLIIIIIIIIDDDDDDDDSSSSSSVVVVVVVLLLLLLLLDDDDDDDDVVVVVVVVVVVVVVRRRRRRRRRRRKKKKKKKKKEEEEEEEEEAAAAAEEEEEEEEEGGGGCCCCCCDDDDDDDDCCCCCCLLLLLLLLQQQQQQQQQGGGGFFFFFFFFFFFQQQQQQQQQIIIIIIIITTTTTTTHHHHHHHHHHSSSSSSLLLLLLLLGGGGGGGGGGGGTTTTTTTGGGGSSSSSSGGGGMMMMMMMMGGGGTTTTTTTLLLLLLLLLLLLLLLLIIIIIIIISSSSSSKKKKKKKKKVVVVVVVRRRRRRRRRRREEEEEEEEEEEEEEEEEEYYYYYYYYYYYYPPPPPPPDDDDDDDDRRRRRRRRRRRIIIIIIIIMMMMMMMMEEEEEEEEETTTTTTTFFFFFFFFFFFSSSSSSVVVVVVVVVVVVVVPPPPPPPSSSSSSPPPPPPPKKKKKKKKKVVVVVVVSSSSSSDDDDDDDDTTTTTTTVVVVVVVVVVVVVVEEEEEEEEEPPPPPPPYYYYYYYYYYYYNNNNNNNNAAAAATTTTTTTLLLLLLLLSSSSSSVVVVVVVHHHHHHHHHHQQQQQQQQQLLLLLLLLVVVVVVVEEEEEEEEENNNNNNNNAAAAADDDDDDDDEEEEEEEEECCCCCCMMMMMMMMVVVVVVVIIIIIIIIDDDDDDDDNNNNNNNNEEEEEEEEEAAAAALLLLLLLLYYYYYYYYYYYYDDDDDDDDIIIIIIIICCCCCCFFFFFFFFFFFRRRRRRRRRRRTTTTTTTLLLLLLLLKKKKKKKKKLLLLLLLLTTTTTTTTTTTTTTPPPPPPPTTTTTTTYYYYYYYYYYYYGGGGDDDDDDDDLLLLLLLLNNNNNNNNHHHHHHHHHHLLLLLLLLVVVVVVVSSSSSSAAAAAAAAAAMMMMMMMMSSSSSSGGGGVVVVVVVTTTTTTTCCCCCCCCCCCCLLLLLLLLRRRRRRRRRRRFFFFFFFFFFFPPPPPPPGGGGQQQQQQQQQLLLLLLLLNNNNNNNNSSSSSSDDDDDDDDLLLLLLLLRRRRRRRRRRRKKKKKKKKKLLLLLLLLAAAAAVVVVVVVNNNNNNNNLLLLLLLLIIIIIIIIPPPPPPPFFFFFFFFFFFPPPPPPPRRRRRRRRRRRLLLLLLLLHHHHHHHHHHFFFFFFFFFFFFFFFFFFFFFFMMMMMMMMIIIIIIIIGGGGFFFFFFFFFFFAAAAAPPPPPPPLLLLLLLLTTTTTTTSSSSSSRRRRRRRRRRRGGGGSSSSSSQQQQQQQQQQQQQQQQQQYYYYYYYYYYYYRRRRRRRRRRRAAAAALLLLLLLLTTTTTTTVVVVVVVPPPPPPPEEEEEEEEELLLLLLLLTTTTTTTQQQQQQQQQQQQQQQQQQMMMMMMMMFFFFFFFFFFFDDDDDDDDAAAAAKKKKKKKKKNNNNNNNNMMMMMMMMMMMMMMMMCCCCCCAAAAAAAAAADDDDDDDDPPPPPPPRRRRRRRRRRRHHHHHHHHHHGGGGRRRRRRRRRRRYYYYYYYYYYYYLLLLLLLLTTTTTTTAAAAASSSSSSAAAAALLLLLLLLFFFFFFFFFFFRRRRRRRRRRRGGGGRRRRRRRRRRRMMMMMMMMSSSSSSTTTTTTTKKKKKKKKKEEEEEEEEEVVVVVVVDDDDDDDDEEEEEEEEEQQQQQQQQQMMMMMMMMLLLLLLLLNNNNNNNNVVVVVVVQQQQQQQQQNNNNNNNNKKKKKKKKKNNNNNNNNSSSSSSSSSSSSYYYYYYYYYYYYFFFFFFFFFFFVVVVVVVEEEEEEEEEWWWWWWWWWWWWWWIIIIIIIIPPPPPPPNNNNNNNNNNNNNNNNIIIIIIIIKKKKKKKKKSSSSSSSSSSSSIIIIIIIICCCCCCDDDDDDDDIIIIIIIIPPPPPPPPPPPPPPKKKKKKKKKGGGGLLLLLLLLKKKKKKKKKMMMMMMMMAAAAAVVVVVVVTTTTTTTFFFFFFFFFFFVVVVVVVGGGGNNNNNNNNSSSSSSTTTTTTTAAAAAIIIIIIIIQQQQQQQQQEEEEEEEEEMMMMMMMMFFFFFFFFFFFKKKKKKKKKRRRRRRRRRRRVVVVVVVAAAAAEEEEEEEEEQQQQQQQQQFFFFFFFFFFFTTTTTTTAAAAAMMMMMMMMFFFFFFFFFFFRRRRRRRRRRRRRRRRRRRRRRKKKKKKKKKAAAAAFFFFFFFFFFFLLLLLLLLHHHHHHHHHHWWWWWWWWWWWWWWYYYYYYYYYYYYTTTTTTTGGGGEEEEEEEEEGGGGMMMMMMMMDDDDDDDDEEEEEEEEEMMMMMMMMEEEEEEEEEFFFFFFFFFFFTTTTTTTEEEEEEEEEAAAAAEEEEEEEEESSSSSSNNNNNNNNMMMMMMMMNNNNNNNNDDDDDDDDLLLLLLLLVVVVVVVSSSSSSEEEEEEEEEYYYYYYYYYYYYQQQQQQQQQQQQQQQQQQYYYYYYYYYYYYQQQQQQQQQDDDDDDDDAAAAATTTTTTTAAAAAEEEEEEEEEEEEEEEEEEEEEEEEEEEGGGGEEEEEEEEEFFFFFFFFFFFEEEEEEEEEEEEEEEEEEEEEEEEEEEEEEEEEEEEGGGGEEEEEEEEENNNNNNNNN

SEQ ID NO: 253 - protein, 3466 aa, Thalassiosira weisflogii
MMMMMMMMRRRRRRRRRRREEEEEEEEEIIIIIIIIVVVVVVVHHHHHHHHHHIIIIIIIIQQQQQQQQQGGGGGGGGQQQQQQQQQCCCCCCGGGGNNNNNNNNQQQQQQQQQIIIIIIIIGGGGAAAAAKKKKKKKKKFFFFFFFFFFFWWWWWWWWWWWWWWEEEEEEEEEVVVVVVVMMMMMMMMSSSSSSDDDDDDDDEEEEEEEEEHHHHHHHHHHGGGGVVVVVVVDDDDDDDDPPPPPPPTTTTTTTGGGGTTTTTTTYYYYYYYYYYYYHHHHHHHHHHGGGGDDDDDDDDSSSSSSDDDDDDDDLLLLLLLLQQQQQQQQQLLLLLLLLEEEEEEEEERRRRRRRRRRRIIIIIIIINNNNNNNNVVVVVVVYYYYYYYYYYYYFFFFFFFFFFFNNNNNNNNEEEEEEEEEAAAAATTTTTTTGGGGGGGGRRRRRRRRRRRYYYYYYYYYYYYVVVVVVVPPPPPPPRRRRRRRRRRRAAAAAIIIIIIIILLLLLLLLMMMMMMMMDDDDDDDDLLLLLLLLEEEEEEEEEPPPPPPPGGGGTTTTTTTMMMMMMMMDDDDDDDDSSSSSSVVVVVVVRRRRRRRRRRRAAAAAGGGGPPPPPPPFFFFFFFFFFFGGGGQQQQQQQQQLLLLLLLLFFFFFFFFFFFRRRRRRRRRRRPPPPPPPDDDDDDDDNNNNNNNNFFFFFFFFFFFVVVVVVVFFFFFFFFFFFGGGGQQQQQQQQQTTTTTTTGGGGAAAAAGGGGNNNNNNNNNNNNNNNNWWWWWWWWWWWWWWAAAAAKKKKKKKKKGGGGHHHHHHHHHHYYYYYYYYYYYYTTTTTTTEEEEEEEEEGGGGAAAAAEEEEEEEEELLLLLLLLIIIIIIIIDDDDDDDDSSSSSSVVVVVVVLLLLLLLLDDDDDDDDVVVVVVVVVVVVVVRRRRRRRRRRRKKKKKKKKKEEEEEEEEEAAAAAEEEEEEEEESSSSSSCCCCCCDDDDDDDDCCCCCCMMMMMMMMQQQQQQQQQGGGGFFFFFFFFFFFQQQQQQQQQLLLLLLLLTTTTTTTHHHHHHHHHHSSSSSSMMMMMMMMGGGGGGGGGGGGTTTTTTTGGGGAAAAAGGGGMMMMMMMMGGGGTTTTTTTLLLLLLLLLLLLLLLLIIIIIIIISSSSSSKKKKKKKKKIIIIIIIIRRRRRRRRRRREEEEEEEEEEEEEEEEEEYYYYYYYYYYYYPPPPPPPDDDDDDDDRRRRRRRRRRRVVVVVVVMMMMMMMMSSSSSSTTTTTTTYYYYYYYYYYYYSSSSSSVVVVVVVIIIIIIIIPPPPPPPSSSSSSPPPPPPPKKKKKKKKKVVVVVVVSSSSSSDDDDDDDDTTTTTTTVVVVVVVVVVVVVVEEEEEEEEEPPPPPPPYYYYYYYYYYYYNNNNNNNNAAAAATTTTTTTLLLLLLLLSSSSSSVVVVVVVHHHHHHHHHHQQQQQQQQQLLLLLLLLVVVVVVVEEEEEEEEENNNNNNNNAAAAADDDDDDDDQQQQQQQQQCCCCCCFFFFFFFFFFFAAAAALLLLLLLLDDDDDDDDNNNNNNNNEEEEEEEEEAAAAALLLLLLLLYYYYYYYYYYYYDDDDDDDDIIIIIIIICCCCCCFFFFFFFFFFFRRRRRRRRRRRTTTTTTTLLLLLLLLKKKKKKKKKLLLLLLLLTTTTTTTTTTTTTTPPPPPPPTTTTTTTYYYYYYYYYYYYGGGGDDDDDDDDLLLLLLLLNNNNNNNNHHHHHHHHHHLLLLLLLLIIIIIIIIAAAAAAAAAAAAAAAVVVVVVVCCCCCCGGGGTTTTTTTTTTTTTTCCCCCCCCCCCCLLLLLLLLRRRRRRRRRRRFFFFFFFFFFFPPPPPPPGGGGQQQQQQQQQLLLLLLLLNNNNNNNNCCCCCCDDDDDDDDLLLLLLLLRRRRRRRRRRRKKKKKKKKKLLLLLLLLAAAAAVVVVVVVNNNNNNNNMMMMMMMMVVVVVVVPPPPPPPFFFFFFFFFFFPPPPPPPRRRRRRRRRRRLLLLLLLLHHHHHHHHHHFFFFFFFFFFFFFFFFFFFFFFMMMMMMMMVVVVVVVGGGGYYYYYYYYYYYYAAAAAPPPPPPPLLLLLLLLTTTTTTTSSSSSSRRRRRRRRRRRGGGGSSSSSSQQQQQQQQQQQQQQQQQQYYYYYYYYYYYYRRRRRRRRRRRAAAAALLLLLLLLTTTTTTTVVVVVVVPPPPPPPEEEEEEEEELLLLLLLLTTTTTTTQQQQQQQQQQQQQQQQQQCCCCCCFFFFFFFFFFFDDDDDDDDAAAAAKKKKKKKKKNNNNNNNNMMMMMMMMMMMMMMMMCCCCCCAAAAAAAAAADDDDDDDDPPPPPPPRRRRRRRRRRRHHHHHHHHHHGGGGRRRRRRRRRRRYYYYYYYYYYYYLLLLLLLLTTTTTTTCCCCCCAAAAAVVVVVVVLLLLLLLLFFFFFFFFFFFRRRRRRRRRRRGGGGRRRRRRRRRRRMMMMMMMMSSSSSSSSSSSSKKKKKKKKKEEEEEEEEEVVVVVVVDDDDDDDDEEEEEEEEEQQQQQQQQQMMMMMMMMLLLLLLLLNNNNNNNNVVVVVVVVVVVVVVNNNNNNNNKKKKKKKKKSSSSSSSSSSSSSSSSSSYYYYYYYYYYYYFFFFFFFFFFFVVVVVVVEEEEEEEEEWWWWWWWWWWWWWWIIIIIIIIPPPPPPPNNNNNNNNNNNNNNNNVVVVVVVKKKKKKKKKAAAAASSSSSSIIIIIIIICCCCCCDDDDDDDDIIIIIIIIPPPPPPPPPPPPPPKKKKKKKKKGGGGLLLLLLLLKKKKKKKKKMMMMMMMMAAAAATTTTTTTTTTTTTTFFFFFFFFFFFVVVVVVVGGGGNNNNNNNNTTTTTTTTTTTTTTAAAAAVVVVVVVQQQQQQQQQEEEEEEEEETTTTTTTWWWWWWWWWWWWWWKKKKKKKKKRRRRRRRRRRRVVVVVVVAAAAAEEEEEEEEEQQQQQQQQQFFFFFFFFFFFTTTTTTTVVVVVVVMMMMMMMMFFFFFFFFFFFRRRRRRRRRRRRRRRRRRRRRRKKKKKKKKKAAAAAFFFFFFFFFFFLLLLLLLLHHHHHHHHHHWWWWWWWWWWWWWWYYYYYYYYYYYYTTTTTTTGGGGEEEEEEEEEGGGGMMMMMMMMDDDDDDDDEEEEEEEEEMMMMMMMMEEEEEEEEEFFFFFFFFFFFTTTTTTTEEEEEEEEEAAAAAEEEEEEEEESSSSSSNNNNNNNNMMMMMMMMNNNNNNNNDDDDDDDDLLLLLLLLVVVVVVVSSSSSSEEEEEEEEEYYYYYYYYYYYYQQQQQQQQQQQQQQQQQQYYYYYYYYYYYYQQQQQQQQQDDDDDDDDAAAAATTTTTTTAAAAADDDDDDDDEEEEEEEEEEEEEEEEEEGGGGEEEEEEEEEFFFFFFFFFFFDDDDDDDDEEEEEEEEEDDDDDDDDEEEEEEEEEMMMMMMMMEEEEEEEEEGGGGG

SEQ ID NO: 254 - protein, 3508 aa, Toxoplasma gondii
MMMMMMMMRRRRRRRRRRREEEEEEEEEIIIIIIIIVVVVVVVHHHHHHHHHHVVVVVVVQQQQQQQQQGGGGGGGGQQQQQQQQQCCCCCCGGGGNNNNNNNNQQQQQQQQQIIIIIIIIGGGGAAAAAKKKKKKKKKFFFFFFFFFFFWWWWWWWWWWWWWWEEEEEEEEEVVVVVVVIIIIIIIISSSSSSDDDDDDDDEEEEEEEEEHHHHHHHHHHGGGGIIIIIIIIDDDDDDDDPPPPPPPTTTTTTTGGGGTTTTTTTYYYYYYYYYYYYCCCCCCGGGGDDDDDDDDSSSSSSDDDDDDDDLLLLLLLLQQQQQQQQQLLLLLLLLEEEEEEEEERRRRRRRRRRRIIIIIIIINNNNNNNNVVVVVVVFFFFFFFFFFFYYYYYYYYYYYYNNNNNNNNEEEEEEEEEAAAAATTTTTTTGGGGGGGGRRRRRRRRRRRFFFFFFFFFFFVVVVVVVPPPPPPPRRRRRRRRRRRAAAAAIIIIIIIILLLLLLLLMMMMMMMMDDDDDDDDLLLLLLLLEEEEEEEEEPPPPPPPGGGGTTTTTTTMMMMMMMMDDDDDDDDSSSSSSVVVVVVVRRRRRRRRRRRAAAAAGGGGPPPPPPPFFFFFFFFFFFGGGGQQQQQQQQQLLLLLLLLFFFFFFFFFFFRRRRRRRRRRRPPPPPPPDDDDDDDDNNNNNNNNFFFFFFFFFFFVVVVVVVFFFFFFFFFFFGGGGQQQQQQQQQTTTTTTTGGGGAAAAAGGGGNNNNNNNNNNNNNNNNWWWWWWWWWWWWWWAAAAAKKKKKKKKKGGGGHHHHHHHHHHYYYYYYYYYYYYTTTTTTTEEEEEEEEEGGGGAAAAAEEEEEEEEELLLLLLLLIIIIIIIIDDDDDDDDSSSSSSVVVVVVVLLLLLLLLDDDDDDDDVVVVVVVVVVVVVVRRRRRRRRRRRKKKKKKKKKEEEEEEEEEAAAAAEEEEEEEEEGGGGCCCCCCDDDDDDDDCCCCCCLLLLLLLLQQQQQQQQQGGGGFFFFFFFFFFFQQQQQQQQQIIIIIIIITTTTTTTHHHHHHHHHHSSSSSSLLLLLLLLGGGGGGGGGGGGTTTTTTTGGGGSSSSSSGGGGMMMMMMMMGGGGTTTTTTTLLLLLLLLLLLLLLLLIIIIIIIISSSSSSKKKKKKKKKVVVVVVVRRRRRRRRRRREEEEEEEEEEEEEEEEEEYYYYYYYYYYYYPPPPPPPDDDDDDDDRRRRRRRRRRRIIIIIIIIMMMMMMMMEEEEEEEEETTTTTTTFFFFFFFFFFFSSSSSSVVVVVVVFFFFFFFFFFFPPPPPPPSSSSSSPPPPPPPKKKKKKKKKVVVVVVVSSSSSSDDDDDDDDTTTTTTTVVVVVVVVVVVVVVEEEEEEEEEPPPPPPPYYYYYYYYYYYYNNNNNNNNAAAAATTTTTTTLLLLLLLLSSSSSSVVVVVVVHHHHHHHHHHQQQQQQQQQLLLLLLLLVVVVVVVEEEEEEEEENNNNNNNNAAAAADDDDDDDDEEEEEEEEEVVVVVVVQQQQQQQQQVVVVVVVIIIIIIIIDDDDDDDDNNNNNNNNEEEEEEEEEAAAAALLLLLLLLYYYYYYYYYYYYDDDDDDDDIIIIIIIICCCCCCFFFFFFFFFFFRRRRRRRRRRRTTTTTTTLLLLLLLLKKKKKKKKKLLLLLLLLTTTTTTTTTTTTTTPPPPPPPTTTTTTTYYYYYYYYYYYYGGGGDDDDDDDDLLLLLLLLNNNNNNNNHHHHHHHHHHLLLLLLLLVVVVVVVSSSSSSAAAAAAAAAAMMMMMMMMSSSSSSGGGGVVVVVVVTTTTTTTCCCCCCCCCCCCLLLLLLLLRRRRRRRRRRRFFFFFFFFFFFPPPPPPPGGGGQQQQQQQQQLLLLLLLLNNNNNNNNSSSSSSDDDDDDDDLLLLLLLLRRRRRRRRRRRKKKKKKKKKLLLLLLLLAAAAAVVVVVVVNNNNNNNNLLLLLLLLVVVVVVVPPPPPPPFFFFFFFFFFFPPPPPPPRRRRRRRRRRRLLLLLLLLHHHHHHHHHHFFFFFFFFFFFFFFFFFFFFFFLLLLLLLLIIIIIIIIGGGGFFFFFFFFFFFAAAAAPPPPPPPLLLLLLLLTTTTTTTSSSSSSRRRRRRRRRRRGGGGSSSSSSQQQQQQQQQQQQQQQQQQYYYYYYYYYYYYRRRRRRRRRRRAAAAALLLLLLLLSSSSSSVVVVVVVPPPPPPPEEEEEEEEELLLLLLLLTTTTTTTQQQQQQQQQQQQQQQQQQMMMMMMMMFFFFFFFFFFFDDDDDDDDAAAAAKKKKKKKKKNNNNNNNNMMMMMMMMMMMMMMMMCCCCCCAAAAASSSSSSDDDDDDDDPPPPPPPRRRRRRRRRRRHHHHHHHHHHGGGGRRRRRRRRRRRYYYYYYYYYYYYLLLLLLLLTTTTTTTAAAAASSSSSSAAAAAMMMMMMMMFFFFFFFFFFFRRRRRRRRRRRGGGGRRRRRRRRRRRMMMMMMMMSSSSSSTTTTTTTKKKKKKKKKEEEEEEEEEVVVVVVVDDDDDDDDEEEEEEEEEQQQQQQQQQMMMMMMMMLLLLLLLLNNNNNNNNVVVVVVVQQQQQQQQQNNNNNNNNKKKKKKKKKNNNNNNNNSSSSSSSSSSSSYYYYYYYYYYYYFFFFFFFFFFFVVVVVVVEEEEEEEEEWWWWWWWWWWWWWWIIIIIIIIPPPPPPPNNNNNNNNNNNNNNNNMMMMMMMMKKKKKKKKKSSSSSSSSSSSSVVVVVVVCCCCCCDDDDDDDDIIIIIIIIPPPPPPPPPPPPPPKKKKKKKKKGGGGLLLLLLLLKKKKKKKKKMMMMMMMMSSSSSSVVVVVVVTTTTTTTFFFFFFFFFFFVVVVVVVGGGGNNNNNNNNSSSSSSTTTTTTTAAAAAIIIIIIIIQQQQQQQQQEEEEEEEEEMMMMMMMMFFFFFFFFFFFKKKKKKKKKRRRRRRRRRRRVVVVVVVSSSSSSDDDDDDDDQQQQQQQQQFFFFFFFFFFFTTTTTTTAAAAAMMMMMMMMFFFFFFFFFFFRRRRRRRRRRRRRRRRRRRRRRKKKKKKKKKAAAAAFFFFFFFFFFFLLLLLLLLHHHHHHHHHHWWWWWWWWWWWWWWYYYYYYYYYYYYTTTTTTTGGGGEEEEEEEEEGGGGMMMMMMMMDDDDDDDDEEEEEEEEEMMMMMMMMEEEEEEEEEFFFFFFFFFFFTTTTTTTEEEEEEEEEAAAAAEEEEEEEEESSSSSSNNNNNNNNMMMMMMMMNNNNNNNNDDDDDDDDLLLLLLLLVVVVVVVSSSSSSEEEEEEEEEYYYYYYYYYYYYQQQQQQQQQQQQQQQQQQYYYYYYYYYYYYQQQQQQQQQDDDDDDDDAAAAATTTTTTTAAAAAEEEEEEEEEEEEEEEEEEEEEEEEEEEGGGGEEEEEEEEEFFFFFFFFFFFDDDDDDDDEEEEEEEEEEEEEEEEEEEEEEEEEEEGGGGEEEEEEEEEMMMMMMMMGGGGAAAAAEEEEEEEEEEEEEEEEEEGGGGAAAAAA

SEQ ID NO: 255 - protein, 3479 aa, Trypanosoma brucei
MMMMMMMMRRRRRRRRRRREEEEEEEEEIIIIIIIIVVVVVVVCCCCCCVVVVVVVQQQQQQQQQAAAAAGGGGQQQQQQQQQCCCCCCGGGGNNNNNNNNQQQQQQQQQIIIIIIIIGGGGSSSSSSKKKKKKKKKFFFFFFFFFFFWWWWWWWWWWWWWWEEEEEEEEEVVVVVVVIIIIIIIISSSSSSDDDDDDDDEEEEEEEEEHHHHHHHHHHGGGGVVVVVVVDDDDDDDDPPPPPPPTTTTTTTGGGGTTTTTTTYYYYYYYYYYYYQQQQQQQQQGGGGDDDDDDDDSSSSSSDDDDDDDDLLLLLLLLQQQQQQQQQLLLLLLLLEEEEEEEEERRRRRRRRRRRIIIIIIIINNNNNNNNVVVVVVVYYYYYYYYYYYYFFFFFFFFFFFDDDDDDDDEEEEEEEEEAAAAATTTTTTTGGGGGGGGRRRRRRRRRRRYYYYYYYYYYYYVVVVVVVPPPPPPPRRRRRRRRRRRSSSSSSVVVVVVVLLLLLLLLIIIIIIIIDDDDDDDDLLLLLLLLEEEEEEEEEPPPPPPPGGGGTTTTTTTMMMMMMMMDDDDDDDDSSSSSSVVVVVVVRRRRRRRRRRRAAAAAGGGGPPPPPPPYYYYYYYYYYYYGGGGQQQQQQQQQIIIIIIIIFFFFFFFFFFFRRRRRRRRRRRPPPPPPPDDDDDDDDNNNNNNNNFFFFFFFFFFFIIIIIIIIFFFFFFFFFFFGGGGQQQQQQQQQSSSSSSGGGGAAAAAGGGGNNNNNNNNNNNNNNNNWWWWWWWWWWWWWWAAAAAKKKKKKKKKGGGGHHHHHHHHHHYYYYYYYYYYYYTTTTTTTEEEEEEEEEGGGGAAAAAEEEEEEEEELLLLLLLLIIIIIIIIDDDDDDDDSSSSSSVVVVVVVLLLLLLLLDDDDDDDDVVVVVVVCCCCCCCCCCCCKKKKKKKKKEEEEEEEEEAAAAAEEEEEEEEESSSSSSCCCCCCDDDDDDDDCCCCCCLLLLLLLLQQQQQQQQQGGGGFFFFFFFFFFFQQQQQQQQQIIIIIIIICCCCCCHHHHHHHHHHSSSSSSLLLLLLLLGGGGGGGGGGGGTTTTTTTGGGGSSSSSSGGGGMMMMMMMMGGGGTTTTTTTLLLLLLLLLLLLLLLLIIIIIIIISSSSSSKKKKKKKKKLLLLLLLLRRRRRRRRRRREEEEEEEEEQQQQQQQQQYYYYYYYYYYYYPPPPPPPDDDDDDDDRRRRRRRRRRRIIIIIIIIMMMMMMMMMMMMMMMMTTTTTTTFFFFFFFFFFFSSSSSSIIIIIIIIIIIIIIIIPPPPPPPSSSSSSPPPPPPPKKKKKKKKKVVVVVVVSSSSSSDDDDDDDDTTTTTTTVVVVVVVVVVVVVVEEEEEEEEEPPPPPPPYYYYYYYYYYYYNNNNNNNNTTTTTTTTTTTTTTLLLLLLLLSSSSSSVVVVVVVHHHHHHHHHHQQQQQQQQQLLLLLLLLVVVVVVVEEEEEEEEENNNNNNNNSSSSSSDDDDDDDDEEEEEEEEESSSSSSMMMMMMMMCCCCCCIIIIIIIIDDDDDDDDNNNNNNNNEEEEEEEEEAAAAALLLLLLLLYYYYYYYYYYYYDDDDDDDDIIIIIIIICCCCCCFFFFFFFFFFFRRRRRRRRRRRTTTTTTTLLLLLLLLKKKKKKKKKLLLLLLLLTTTTTTTTTTTTTTPPPPPPPTTTTTTTFFFFFFFFFFFGGGGDDDDDDDDLLLLLLLLNNNNNNNNHHHHHHHHHHLLLLLLLLVVVVVVVSSSSSSAAAAAVVVVVVVVVVVVVVSSSSSSGGGGVVVVVVVTTTTTTTCCCCCCCCCCCCLLLLLLLLRRRRRRRRRRRFFFFFFFFFFFPPPPPPPGGGGQQQQQQQQQLLLLLLLLNNNNNNNNSSSSSSDDDDDDDDLLLLLLLLRRRRRRRRRRRKKKKKKKKKLLLLLLLLAAAAAVVVVVVVNNNNNNNNLLLLLLLLVVVVVVVPPPPPPPFFFFFFFFFFFPPPPPPPRRRRRRRRRRRLLLLLLLLHHHHHHHHHHFFFFFFFFFFFFFFFFFFFFFFMMMMMMMMMMMMMMMMGGGGFFFFFFFFFFFAAAAAPPPPPPPLLLLLLLLTTTTTTTSSSSSSRRRRRRRRRRRGGGGSSSSSSQQQQQQQQQQQQQQQQQQYYYYYYYYYYYYRRRRRRRRRRRGGGGLLLLLLLLSSSSSSVVVVVVVPPPPPPPEEEEEEEEELLLLLLLLTTTTTTTQQQQQQQQQQQQQQQQQQMMMMMMMMFFFFFFFFFFFDDDDDDDDAAAAAKKKKKKKKKNNNNNNNNMMMMMMMMMMMMMMMMQQQQQQQQQAAAAAAAAAADDDDDDDDPPPPPPPRRRRRRRRRRRHHHHHHHHHHGGGGRRRRRRRRRRRYYYYYYYYYYYYLLLLLLLLTTTTTTTAAAAASSSSSSAAAAALLLLLLLLFFFFFFFFFFFRRRRRRRRRRRGGGGRRRRRRRRRRRMMMMMMMMSSSSSSTTTTTTTKKKKKKKKKEEEEEEEEEVVVVVVVDDDDDDDDEEEEEEEEEQQQQQQQQQMMMMMMMMLLLLLLLLNNNNNNNNVVVVVVVQQQQQQQQQNNNNNNNNKKKKKKKKKNNNNNNNNSSSSSSSSSSSSYYYYYYYYYYYYFFFFFFFFFFFIIIIIIIIEEEEEEEEEWWWWWWWWWWWWWWIIIIIIIIPPPPPPPNNNNNNNNNNNNNNNNIIIIIIIIKKKKKKKKKSSSSSSSSSSSSVVVVVVVCCCCCCDDDDDDDDIIIIIIIIPPPPPPPPPPPPPPKKKKKKKKKGGGGLLLLLLLLKKKKKKKKKMMMMMMMMAAAAAVVVVVVVTTTTTTTFFFFFFFFFFFIIIIIIIIGGGGNNNNNNNNNNNNNNNNTTTTTTTCCCCCCIIIIIIIIQQQQQQQQQEEEEEEEEEMMMMMMMMFFFFFFFFFFFRRRRRRRRRRRRRRRRRRRRRRVVVVVVVGGGGEEEEEEEEEQQQQQQQQQFFFFFFFFFFFTTTTTTTLLLLLLLLMMMMMMMMFFFFFFFFFFFRRRRRRRRRRRRRRRRRRRRRRKKKKKKKKKAAAAAFFFFFFFFFFFLLLLLLLLHHHHHHHHHHWWWWWWWWWWWWWWYYYYYYYYYYYYTTTTTTTGGGGEEEEEEEEEGGGGMMMMMMMMDDDDDDDDEEEEEEEEEMMMMMMMMEEEEEEEEEFFFFFFFFFFFTTTTTTTEEEEEEEEEAAAAAEEEEEEEEESSSSSSNNNNNNNNMMMMMMMMNNNNNNNNDDDDDDDDLLLLLLLLVVVVVVVSSSSSSEEEEEEEEEYYYYYYYYYYYYQQQQQQQQQQQQQQQQQQYYYYYYYYYYYYQQQQQQQQQDDDDDDDDAAAAATTTTTTTIIIIIIIIEEEEEEEEEEEEEEEEEEEEEEEEEEEGGGGEEEEEEEEEFFFFFFFFFFFDDDDDDDDEEEEEEEEEEEEEEEEEEEEEEEEEEEQQQQQQQQQYYYYYYYYYYYYY

SEQ ID NO: 256 - protein, 3471 aa, Trypanosoma cruzi
MMMMMMMMRRRRRRRRRRREEEEEEEEEIIIIIIIIVVVVVVVCCCCCCVVVVVVVQQQQQQQQQAAAAAGGGGQQQQQQQQQCCCCCCGGGGNNNNNNNNQQQQQQQQQIIIIIIIIGGGGSSSSSSKKKKKKKKKFFFFFFFFFFFWWWWWWWWWWWWWWEEEEEEEEEVVVVVVVIIIIIIIISSSSSSDDDDDDDDEEEEEEEEEHHHHHHHHHHGGGGVVVVVVVDDDDDDDDPPPPPPPTTTTTTTGGGGTTTTTTTYYYYYYYYYYYYQQQQQQQQQGGGGDDDDDDDDSSSSSSDDDDDDDDLLLLLLLLQQQQQQQQQLLLLLLLLEEEEEEEEERRRRRRRRRRRIIIIIIIINNNNNNNNVVVVVVVYYYYYYYYYYYYFFFFFFFFFFFDDDDDDDDEEEEEEEEEAAAAATTTTTTTGGGGGGGGRRRRRRRRRRRYYYYYYYYYYYYVVVVVVVPPPPPPPRRRRRRRRRRRAAAAAVVVVVVVLLLLLLLLIIIIIIIIDDDDDDDDLLLLLLLLEEEEEEEEEPPPPPPPGGGGTTTTTTTMMMMMMMMDDDDDDDDSSSSSSVVVVVVVRRRRRRRRRRRAAAAAGGGGPPPPPPPYYYYYYYYYYYYGGGGQQQQQQQQQIIIIIIIIFFFFFFFFFFFRRRRRRRRRRRPPPPPPPDDDDDDDDNNNNNNNNFFFFFFFFFFFIIIIIIIIFFFFFFFFFFFGGGGQQQQQQQQQSSSSSSGGGGAAAAAGGGGNNNNNNNNNNNNNNNNWWWWWWWWWWWWWWAAAAAKKKKKKKKKGGGGHHHHHHHHHHYYYYYYYYYYYYTTTTTTTEEEEEEEEEGGGGAAAAAEEEEEEEEELLLLLLLLIIIIIIIIDDDDDDDDSSSSSSVVVVVVVLLLLLLLLDDDDDDDDVVVVVVVCCCCCCRRRRRRRRRRRKKKKKKKKKEEEEEEEEEAAAAAEEEEEEEEESSSSSSCCCCCCDDDDDDDDCCCCCCLLLLLLLLQQQQQQQQQGGGGFFFFFFFFFFFQQQQQQQQQIIIIIIIICCCCCCHHHHHHHHHHSSSSSSLLLLLLLLGGGGGGGGGGGGTTTTTTTGGGGSSSSSSGGGGMMMMMMMMGGGGTTTTTTTLLLLLLLLLLLLLLLLIIIIIIIISSSSSSKKKKKKKKKLLLLLLLLRRRRRRRRRRREEEEEEEEEEEEEEEEEEYYYYYYYYYYYYPPPPPPPDDDDDDDDRRRRRRRRRRRIIIIIIIIMMMMMMMMMMMMMMMMTTTTTTTFFFFFFFFFFFSSSSSSIIIIIIIIIIIIIIIIPPPPPPPSSSSSSPPPPPPPKKKKKKKKKVVVVVVVSSSSSSDDDDDDDDTTTTTTTVVVVVVVVVVVVVVEEEEEEEEEPPPPPPPYYYYYYYYYYYYNNNNNNNNTTTTTTTTTTTTTTLLLLLLLLSSSSSSVVVVVVVHHHHHHHHHHQQQQQQQQQLLLLLLLLVVVVVVVEEEEEEEEENNNNNNNNSSSSSSDDDDDDDDEEEEEEEEESSSSSSMMMMMMMMCCCCCCIIIIIIIIDDDDDDDDNNNNNNNNEEEEEEEEEAAAAALLLLLLLLYYYYYYYYYYYYDDDDDDDDIIIIIIIICCCCCCFFFFFFFFFFFRRRRRRRRRRRTTTTTTTLLLLLLLLKKKKKKKKKLLLLLLLLTTTTTTTTTTTTTTPPPPPPPTTTTTTTFFFFFFFFFFFGGGGDDDDDDDDLLLLLLLLNNNNNNNNHHHHHHHHHHLLLLLLLLVVVVVVVSSSSSSAAAAAVVVVVVVVVVVVVVSSSSSSGGGGVVVVVVVTTTTTTTCCCCCCCCCCCCLLLLLLLLRRRRRRRRRRRFFFFFFFFFFFPPPPPPPGGGGQQQQQQQQQLLLLLLLLNNNNNNNNSSSSSSDDDDDDDDLLLLLLLLRRRRRRRRRRRKKKKKKKKKLLLLLLLLAAAAAVVVVVVVNNNNNNNNLLLLLLLLVVVVVVVPPPPPPPFFFFFFFFFFFPPPPPPPRRRRRRRRRRRLLLLLLLLHHHHHHHHHHFFFFFFFFFFFFFFFFFFFFFFMMMMMMMMMMMMMMMMGGGGFFFFFFFFFFFAAAAAPPPPPPPLLLLLLLLSSSSSSSSSSSSRRRRRRRRRRRGGGGSSSSSSQQQQQQQQQQQQQQQQQQYYYYYYYYYYYYRRRRRRRRRRRGGGGLLLLLLLLSSSSSSVVVVVVVPPPPPPPDDDDDDDDVVVVVVVTTTTTTTQQQQQQQQQQQQQQQQQQMMMMMMMMFFFFFFFFFFFDDDDDDDDAAAAAKKKKKKKKKNNNNNNNNMMMMMMMMMMMMMMMMQQQQQQQQQAAAAAAAAAADDDDDDDDPPPPPPPAAAAAHHHHHHHHHHGGGGRRRRRRRRRRRYYYYYYYYYYYYLLLLLLLLTTTTTTTAAAAASSSSSSAAAAALLLLLLLLFFFFFFFFFFFRRRRRRRRRRRGGGGRRRRRRRRRRRMMMMMMMMSSSSSSTTTTTTTKKKKKKKKKEEEEEEEEEVVVVVVVDDDDDDDDEEEEEEEEEQQQQQQQQQMMMMMMMMLLLLLLLLNNNNNNNNVVVVVVVQQQQQQQQQNNNNNNNNKKKKKKKKKNNNNNNNNSSSSSSSSSSSSYYYYYYYYYYYYFFFFFFFFFFFIIIIIIIIEEEEEEEEEWWWWWWWWWWWWWWIIIIIIIIPPPPPPPNNNNNNNNNNNNNNNNIIIIIIIIKKKKKKKKKSSSSSSSSSSSSIIIIIIIICCCCCCDDDDDDDDIIIIIIIIPPPPPPPPPPPPPPKKKKKKKKKGGGGLLLLLLLLKKKKKKKKKMMMMMMMMAAAAAVVVVVVVTTTTTTTFFFFFFFFFFFVVVVVVVGGGGNNNNNNNNNNNNNNNNTTTTTTTCCCCCCIIIIIIIIQQQQQQQQQEEEEEEEEEMMMMMMMMFFFFFFFFFFFRRRRRRRRRRRRRRRRRRRRRRVVVVVVVGGGGEEEEEEEEEQQQQQQQQQFFFFFFFFFFFTTTTTTTAAAAAMMMMMMMMFFFFFFFFFFFRRRRRRRRRRRRRRRRRRRRRRKKKKKKKKKAAAAAFFFFFFFFFFFLLLLLLLLHHHHHHHHHHWWWWWWWWWWWWWWYYYYYYYYYYYYTTTTTTTGGGGEEEEEEEEEGGGGMMMMMMMMDDDDDDDDEEEEEEEEEMMMMMMMMEEEEEEEEEFFFFFFFFFFFTTTTTTTEEEEEEEEEAAAAAEEEEEEEEESSSSSSNNNNNNNNMMMMMMMMNNNNNNNNDDDDDDDDLLLLLLLLVVVVVVVSSSSSSEEEEEEEEEYYYYYYYYYYYYQQQQQQQQQQQQQQQQQQYYYYYYYYYYYYQQQQQQQQQDDDDDDDDAAAAATTTTTTTIIIIIIIIEEEEEEEEEEEEEEEEEEEEEEEEEEEGGGGEEEEEEEEEFFFFFFFFFFFDDDDDDDDEEEEEEEEEEEEEEEEEEEEEEEEEEEQQQQQQQQQYYYYYYYYYYYYY

SEQ ID NO: 257 - protein, 3488 aa, Venturia inaequalis
MMMMMMMMRRRRRRRRRRREEEEEEEEEIIIIIIIIVVVVVVVHHHHHHHHHHLLLLLLLLQQQQQQQQQTTTTTTTGGGGQQQQQQQQQCCCCCCGGGGNNNNNNNNQQQQQQQQQIIIIIIIIGGGGAAAAAAAAAAFFFFFFFFFFFWWWWWWWWWWWWWWQQQQQQQQQTTTTTTTIIIIIIIISSSSSSGGGGEEEEEEEEEHHHHHHHHHHGGGGLLLLLLLLDDDDDDDDGGGGSSSSSSGGGGVVVVVVVYYYYYYYYYYYYNNNNNNNNGGGGTTTTTTTSSSSSSDDDDDDDDLLLLLLLLQQQQQQQQQLLLLLLLLEEEEEEEEERRRRRRRRRRRMMMMMMMMNNNNNNNNVVVVVVVYYYYYYYYYYYYFFFFFFFFFFFNNNNNNNNEEEEEEEEEAAAAASSSSSSGGGGNNNNNNNNKKKKKKKKKFFFFFFFFFFFVVVVVVVPPPPPPPRRRRRRRRRRRAAAAAVVVVVVVLLLLLLLLVVVVVVVDDDDDDDDLLLLLLLLEEEEEEEEEPPPPPPPGGGGTTTTTTTMMMMMMMMDDDDDDDDAAAAAVVVVVVVRRRRRRRRRRRAAAAAGGGGPPPPPPPFFFFFFFFFFFGGGGQQQQQQQQQLLLLLLLLFFFFFFFFFFFRRRRRRRRRRRPPPPPPPDDDDDDDDNNNNNNNNFFFFFFFFFFFVVVVVVVFFFFFFFFFFFGGGGQQQQQQQQQSSSSSSGGGGAAAAAGGGGNNNNNNNNNNNNNNNNWWWWWWWWWWWWWWAAAAAKKKKKKKKKGGGGHHHHHHHHHHYYYYYYYYYYYYTTTTTTTEEEEEEEEEGGGGAAAAAEEEEEEEEELLLLLLLLVVVVVVVDDDDDDDDQQQQQQQQQVVVVVVVLLLLLLLLDDDDDDDDVVVVVVVVVVVVVVRRRRRRRRRRRRRRRRRRRRRREEEEEEEEEAAAAAEEEEEEEEEGGGGCCCCCCDDDDDDDDCCCCCCLLLLLLLLQQQQQQQQQGGGGFFFFFFFFFFFQQQQQQQQQIIIIIIIITTTTTTTHHHHHHHHHHSSSSSSLLLLLLLLGGGGGGGGGGGGTTTTTTTGGGGAAAAAGGGGMMMMMMMMGGGGTTTTTTTLLLLLLLLLLLLLLLLIIIIIIIISSSSSSKKKKKKKKKIIIIIIIIRRRRRRRRRRREEEEEEEEEEEEEEEEEEFFFFFFFFFFFPPPPPPPDDDDDDDDRRRRRRRRRRRMMMMMMMMMMMMMMMMAAAAATTTTTTTFFFFFFFFFFFSSSSSSVVVVVVVVVVVVVVPPPPPPPSSSSSSPPPPPPPKKKKKKKKKVVVVVVVSSSSSSDDDDDDDDTTTTTTTVVVVVVVVVVVVVVEEEEEEEEEPPPPPPPYYYYYYYYYYYYNNNNNNNNAAAAATTTTTTTLLLLLLLLSSSSSSVVVVVVVHHHHHHHHHHQQQQQQQQQLLLLLLLLVVVVVVVEEEEEEEEENNNNNNNNSSSSSSDDDDDDDDEEEEEEEEETTTTTTTFFFFFFFFFFFCCCCCCIIIIIIIIDDDDDDDDNNNNNNNNEEEEEEEEEAAAAALLLLLLLLYYYYYYYYYYYYDDDDDDDDIIIIIIIICCCCCCMMMMMMMMRRRRRRRRRRRTTTTTTTLLLLLLLLKKKKKKKKKLLLLLLLLNNNNNNNNNNNNNNNNPPPPPPPSSSSSSYYYYYYYYYYYYGGGGDDDDDDDDLLLLLLLLNNNNNNNNHHHHHHHHHHLLLLLLLLVVVVVVVSSSSSSAAAAAVVVVVVVMMMMMMMMSSSSSSGGGGVVVVVVVTTTTTTTTTTTTTTCCCCCCLLLLLLLLRRRRRRRRRRRFFFFFFFFFFFPPPPPPPGGGGQQQQQQQQQLLLLLLLLNNNNNNNNSSSSSSDDDDDDDDLLLLLLLLRRRRRRRRRRRKKKKKKKKKLLLLLLLLAAAAAVVVVVVVNNNNNNNNMMMMMMMMVVVVVVVPPPPPPPFFFFFFFFFFFPPPPPPPRRRRRRRRRRRLLLLLLLLHHHHHHHHHHFFFFFFFFFFFFFFFFFFFFFFMMMMMMMMVVVVVVVGGGGFFFFFFFFFFFAAAAAPPPPPPPLLLLLLLLTTTTTTTSSSSSSRRRRRRRRRRRGGGGAAAAAHHHHHHHHHHSSSSSSFFFFFFFFFFFRRRRRRRRRRRAAAAAVVVVVVVTTTTTTTVVVVVVVPPPPPPPEEEEEEEEELLLLLLLLTTTTTTTQQQQQQQQQQQQQQQQQQMMMMMMMMFFFFFFFFFFFDDDDDDDDPPPPPPPKKKKKKKKKNNNNNNNNMMMMMMMMMMMMMMMMAAAAAAAAAASSSSSSDDDDDDDDFFFFFFFFFFFRRRRRRRRRRRNNNNNNNNGGGGRRRRRRRRRRRYYYYYYYYYYYYLLLLLLLLTTTTTTTSSSSSSSSSSSSAAAAAIIIIIIIIFFFFFFFFFFFRRRRRRRRRRRGGGGKKKKKKKKKVVVVVVVSSSSSSMMMMMMMMKKKKKKKKKEEEEEEEEEVVVVVVVEEEEEEEEEDDDDDDDDQQQQQQQQQMMMMMMMMRRRRRRRRRRRNNNNNNNNVVVVVVVQQQQQQQQQNNNNNNNNKKKKKKKKKNNNNNNNNSSSSSSSSSSSSYYYYYYYYYYYYFFFFFFFFFFFVVVVVVVEEEEEEEEEWWWWWWWWWWWWWWIIIIIIIIPPPPPPPNNNNNNNNNNNNNNNNVVVVVVVQQQQQQQQQTTTTTTTAAAAALLLLLLLLCCCCCCSSSSSSIIIIIIIIPPPPPPPPPPPPPPRRRRRRRRRRRGGGGLLLLLLLLKKKKKKKKKMMMMMMMMSSSSSSSSSSSSTTTTTTTFFFFFFFFFFFVVVVVVVGGGGNNNNNNNNSSSSSSTTTTTTTSSSSSSIIIIIIIIQQQQQQQQQEEEEEEEEELLLLLLLLFFFFFFFFFFFKKKKKKKKKRRRRRRRRRRRVVVVVVVGGGGDDDDDDDDQQQQQQQQQFFFFFFFFFFFTTTTTTTAAAAAMMMMMMMMFFFFFFFFFFFRRRRRRRRRRRRRRRRRRRRRRKKKKKKKKKAAAAAFFFFFFFFFFFLLLLLLLLHHHHHHHHHHWWWWWWWWWWWWWWYYYYYYYYYYYYTTTTTTTGGGGEEEEEEEEEGGGGMMMMMMMMDDDDDDDDEEEEEEEEEMMMMMMMMEEEEEEEEEFFFFFFFFFFFTTTTTTTEEEEEEEEEAAAAAEEEEEEEEESSSSSSNNNNNNNNMMMMMMMMNNNNNNNNDDDDDDDDLLLLLLLLVVVVVVVSSSSSSEEEEEEEEEYYYYYYYYYYYYQQQQQQQQQQQQQQQQQQYYYYYYYYYYYYQQQQQQQQQEEEEEEEEEAAAAASSSSSSVVVVVVVSSSSSSEEEEEEEEEGGGGEEEEEEEEEEEEEEEEEEEEEEEEEEEYYYYYYYYYYYYDDDDDDDDEEEEEEEEEEEEEEEEEEAAAAAPPPPPPPLLLLLLLLEEEEEEEEEGGGGEEEEEEEEEEEEEEEEEEE

SEQ ID NO: 258 - protein, 3486 aa, Homo sapiens; identical to SEQ ID NO: 195

SEQ ID NO: 259 - protein, 3579 aa, Saccharomyces cerevisiae
MMMMMMMMRRRRRRRRRRREEEEEEEEEIIIIIIIIIIIIIIIIHHHHHHHHHHIIIIIIIISSSSSSTTTTTTTGGGGQQQQQQQQQCCCCCCGGGGNNNNNNNNQQQQQQQQQIIIIIIIIGGGGAAAAAAAAAAFFFFFFFFFFFWWWWWWWWWWWWWWEEEEEEEEETTTTTTTIIIIIIIICCCCCCGGGGEEEEEEEEEHHHHHHHHHHGGGGLLLLLLLLDDDDDDDDFFFFFFFFFFFNNNNNNNNGGGGTTTTTTTYYYYYYYYYYYYHHHHHHHHHHGGGGHHHHHHHHHHDDDDDDDDDDDDDDDDIIIIIIIIQQQQQQQQQKKKKKKKKKEEEEEEEEERRRRRRRRRRRLLLLLLLLNNNNNNNNVVVVVVVYYYYYYYYYYYYFFFFFFFFFFFNNNNNNNNEEEEEEEEEAAAAASSSSSSSSSSSSGGGGKKKKKKKKKWWWWWWWWWWWWWWVVVVVVVPPPPPPPRRRRRRRRRRRSSSSSSIIIIIIIINNNNNNNNVVVVVVVDDDDDDDDLLLLLLLLEEEEEEEEEPPPPPPPGGGGTTTTTTTIIIIIIIIDDDDDDDDAAAAAVVVVVVVRRRRRRRRRRRNNNNNNNNSSSSSSAAAAAIIIIIIIIGGGGNNNNNNNNLLLLLLLLFFFFFFFFFFFRRRRRRRRRRRPPPPPPPDDDDDDDDNNNNNNNNYYYYYYYYYYYYIIIIIIIIFFFFFFFFFFFGGGGQQQQQQQQQSSSSSSSSSSSSAAAAAGGGGNNNNNNNNVVVVVVVWWWWWWWWWWWWWWAAAAAKKKKKKKKKGGGGHHHHHHHHHHYYYYYYYYYYYYTTTTTTTEEEEEEEEEGGGGAAAAAEEEEEEEEELLLLLLLLVVVVVVVDDDDDDDDSSSSSSVVVVVVVMMMMMMMMDDDDDDDDVVVVVVVIIIIIIIIRRRRRRRRRRRRRRRRRRRRRREEEEEEEEEAAAAAEEEEEEEEEGGGGCCCCCCDDDDDDDDSSSSSSLLLLLLLLQQQQQQQQQGGGGFFFFFFFFFFFQQQQQQQQQIIIIIIIITTTTTTTHHHHHHHHHHSSSSSSLLLLLLLLGGGGGGGGGGGGTTTTTTTGGGGSSSSSSGGGGMMMMMMMMGGGGTTTTTTTLLLLLLLLLLLLLLLLIIIIIIIISSSSSSKKKKKKKKKIIIIIIIIRRRRRRRRRRREEEEEEEEEEEEEEEEEEFFFFFFFFFFFPPPPPPPDDDDDDDDRRRRRRRRRRRMMMMMMMMMMMMMMMMAAAAATTTTTTTFFFFFFFFFFFSSSSSSVVVVVVVLLLLLLLLPPPPPPPSSSSSSPPPPPPPKKKKKKKKKTTTTTTTSSSSSSDDDDDDDDTTTTTTTVVVVVVVVVVVVVVEEEEEEEEEPPPPPPPYYYYYYYYYYYYNNNNNNNNAAAAATTTTTTTLLLLLLLLSSSSSSVVVVVVVHHHHHHHHHHQQQQQQQQQLLLLLLLLVVVVVVVEEEEEEEEEHHHHHHHHHHSSSSSSDDDDDDDDEEEEEEEEETTTTTTTFFFFFFFFFFFCCCCCCIIIIIIIIDDDDDDDDNNNNNNNNEEEEEEEEEAAAAALLLLLLLLYYYYYYYYYYYYDDDDDDDDIIIIIIIICCCCCCQQQQQQQQQRRRRRRRRRRRTTTTTTTLLLLLLLLKKKKKKKKKLLLLLLLLNNNNNNNNQQQQQQQQQPPPPPPPSSSSSSYYYYYYYYYYYYGGGGDDDDDDDDLLLLLLLLNNNNNNNNNNNNNNNNLLLLLLLLVVVVVVVSSSSSSSSSSSSVVVVVVVMMMMMMMMSSSSSSGGGGVVVVVVVTTTTTTTTTTTTTTSSSSSSLLLLLLLLRRRRRRRRRRRYYYYYYYYYYYYPPPPPPPGGGGQQQQQQQQQLLLLLLLLNNNNNNNNSSSSSSDDDDDDDDLLLLLLLLRRRRRRRRRRRKKKKKKKKKLLLLLLLLAAAAAVVVVVVVNNNNNNNNLLLLLLLLVVVVVVVPPPPPPPFFFFFFFFFFFPPPPPPPRRRRRRRRRRRLLLLLLLLHHHHHHHHHHFFFFFFFFFFFFFFFFFFFFFFMMMMMMMMVVVVVVVGGGGYYYYYYYYYYYYAAAAAPPPPPPPLLLLLLLLTTTTTTTAAAAAIIIIIIIIGGGGSSSSSSQQQQQQQQQSSSSSSFFFFFFFFFFFRRRRRRRRRRRSSSSSSLLLLLLLLTTTTTTTVVVVVVVPPPPPPPEEEEEEEEELLLLLLLLTTTTTTTQQQQQQQQQQQQQQQQQQMMMMMMMMFFFFFFFFFFFDDDDDDDDAAAAAKKKKKKKKKNNNNNNNNMMMMMMMMMMMMMMMMAAAAAAAAAAAAAAADDDDDDDDPPPPPPPRRRRRRRRRRRNNNNNNNNGGGGRRRRRRRRRRRYYYYYYYYYYYYLLLLLLLLTTTTTTTVVVVVVVAAAAAAAAAAFFFFFFFFFFFFFFFFFFFFFFRRRRRRRRRRRGGGGKKKKKKKKKVVVVVVVSSSSSSVVVVVVVKKKKKKKKKEEEEEEEEEVVVVVVVEEEEEEEEEDDDDDDDDEEEEEEEEEMMMMMMMMHHHHHHHHHHKKKKKKKKKVVVVVVVQQQQQQQQQSSSSSSKKKKKKKKKNNNNNNNNSSSSSSDDDDDDDDYYYYYYYYYYYYFFFFFFFFFFFVVVVVVVEEEEEEEEEWWWWWWWWWWWWWWIIIIIIIIPPPPPPPNNNNNNNNNNNNNNNNVVVVVVVQQQQQQQQQTTTTTTTAAAAAVVVVVVVCCCCCCSSSSSSVVVVVVVAAAAAPPPPPPPQQQQQQQQQGGGGLLLLLLLLDDDDDDDDMMMMMMMMAAAAAAAAAATTTTTTTFFFFFFFFFFFIIIIIIIIAAAAANNNNNNNNSSSSSSTTTTTTTSSSSSSIIIIIIIIQQQQQQQQQEEEEEEEEELLLLLLLLFFFFFFFFFFFKKKKKKKKKRRRRRRRRRRRVVVVVVVGGGGDDDDDDDDQQQQQQQQQFFFFFFFFFFFSSSSSSAAAAAMMMMMMMMFFFFFFFFFFFKKKKKKKKKRRRRRRRRRRRKKKKKKKKKAAAAAFFFFFFFFFFFLLLLLLLLHHHHHHHHHHWWWWWWWWWWWWWWYYYYYYYYYYYYTTTTTTTSSSSSSEEEEEEEEEGGGGMMMMMMMMDDDDDDDDEEEEEEEEELLLLLLLLEEEEEEEEEFFFFFFFFFFFSSSSSSEEEEEEEEEAAAAAEEEEEEEEESSSSSSNNNNNNNNMMMMMMMMNNNNNNNNDDDDDDDDLLLLLLLLVVVVVVVSSSSSSEEEEEEEEEYYYYYYYYYYYYQQQQQQQQQQQQQQQQQQYYYYYYYYYYYYQQQQQQQQQEEEEEEEEEAAAAATTTTTTTVVVVVVVEEEEEEEEEDDDDDDDDDDDDDDDDEEEEEEEEEEEEEEEEEEVVVVVVVDDDDDDDDEEEEEEEEENNNNNNNNGGGGDDDDDDDDFFFFFFFFFFFGGGGAAAAAPPPPPPPQQQQQQQQQNNNNNNNNQQQQQQQQQDDDDDDDDEEEEEEEEEPPPPPPPIIIIIIIITTTTTTTEEEEEEEEENNNNNNNNFFFFFFFFFFFEEEEEEEEEE

SEQ ID NO: 260 - protein, 3587 aa, Homo sapiens
MMMMMMMMSSSSSSIIIIIIIIVVVVVVVTTTTTTTVVVVVVVQQQQQQQQQLLLLLLLLGGGGQQQQQQQQQCCCCCCGGGGNNNNNNNNQQQQQQQQQIIIIIIIIGGGGFFFFFFFFFFFEEEEEEEEEVVVVVVVFFFFFFFFFFFDDDDDDDDAAAAALLLLLLLLLLLLLLLLSSSSSSDDDDDDDDSSSSSSHHHHHHHHHHSSSSSSSSSSSSQQQQQQQQQGGGGLLLLLLLLCCCCCCSSSSSSMMMMMMMMRRRRRRRRRRREEEEEEEEENNNNNNNNEEEEEEEEEAAAAAYYYYYYYYYYYYQQQQQQQQQAAAAASSSSSSCCCCCCKKKKKKKKKEEEEEEEEERRRRRRRRRRRFFFFFFFFFFFFFFFFFFFFFFSSSSSSEEEEEEEEEEEEEEEEEEEEEEEEEEENNNNNNNNGGGGVVVVVVVPPPPPPPIIIIIIIIAAAAARRRRRRRRRRRAAAAAVVVVVVVLLLLLLLLVVVVVVVDDDDDDDDMMMMMMMMEEEEEEEEEPPPPPPPKKKKKKKKKVVVVVVVIIIIIIIINNNNNNNNQQQQQQQQQTTTTTTTLLLLLLLLSSSSSSKKKKKKKKKAAAAAAAAAAQQQQQQQQQSSSSSSGGGGQQQQQQQQQWWWWWWWWWWWWWWKKKKKKKKKYYYYYYYYYYYYGGGGQQQQQQQQQHHHHHHHHHHAAAAACCCCCCFFFFFFFFFFFCCCCCCQQQQQQQQQKKKKKKKKKQQQQQQQQQGGGGSSSSSSGGGGNNNNNNNNNNNNNNNNWWWWWWWWWWWWWWAAAAAYYYYYYYYYYYYGGGGYYYYYYYYYYYYSSSSSSVVVVVVVHHHHHHHHHHGGGGPPPPPPPRRRRRRRRRRRHHHHHHHHHHEEEEEEEEEEEEEEEEEESSSSSSIIIIIIIIMMMMMMMMNNNNNNNNIIIIIIIIIIIIIIIIRRRRRRRRRRRKKKKKKKKKEEEEEEEEEVVVVVVVEEEEEEEEEKKKKKKKKKCCCCCCDDDDDDDDSSSSSSFFFFFFFFFFFSSSSSSGGGGFFFFFFFFFFFFFFFFFFFFFFIIIIIIIIIIIIIIIIMMMMMMMMSSSSSSMMMMMMMMAAAAAGGGGGGGGTTTTTTTGGGGSSSSSSGGGGLLLLLLLLGGGGAAAAAFFFFFFFFFFFVVVVVVVTTTTTTTQQQQQQQQQNNNNNNNNLLLLLLLLEEEEEEEEEDDDDDDDDQQQQQQQQQYYYYYYYYYYYYSSSSSSNNNNNNNNSSSSSSLLLLLLLLKKKKKKKKKMMMMMMMMNNNNNNNNQQQQQQQQQIIIIIIIIIIIIIIIIWWWWWWWWWWWWWWPPPPPPPYYYYYYYYYYYYGGGGTTTTTTTGGGGEEEEEEEEEVVVVVVVIIIIIIIIVVVVVVVQQQQQQQQQNNNNNNNNYYYYYYYYYYYYNNNNNNNNSSSSSSIIIIIIIILLLLLLLLTTTTTTTLLLLLLLLSSSSSSHHHHHHHHHHLLLLLLLLYYYYYYYYYYYYRRRRRRRRRRRSSSSSSSSSSSSDDDDDDDDAAAAALLLLLLLLLLLLLLLLLLLLLLLLHHHHHHHHHHEEEEEEEEENNNNNNNNDDDDDDDDAAAAAIIIIIIIIHHHHHHHHHHKKKKKKKKKIIIIIIIICCCCCCAAAAAKKKKKKKKKLLLLLLLLMMMMMMMMNNNNNNNNIIIIIIIIKKKKKKKKKQQQQQQQQQIIIIIIIISSSSSSFFFFFFFFFFFSSSSSSDDDDDDDDIIIIIIIINNNNNNNNQQQQQQQQQVVVVVVVLLLLLLLLAAAAAHHHHHHHHHHQQQQQQQQQLLLLLLLLGGGGSSSSSSVVVVVVVFFFFFFFFFFFQQQQQQQQQPPPPPPPTTTTTTTYYYYYYYYYYYYSSSSSSAAAAAEEEEEEEEESSSSSSSSSSSSFFFFFFFFFFFHHHHHHHHHHYYYYYYYYYYYYRRRRRRRRRRRRRRRRRRRRRRNNNNNNNNPPPPPPPLLLLLLLLGGGGDDDDDDDDLLLLLLLLMMMMMMMMEEEEEEEEEHHHHHHHHHHLLLLLLLLVVVVVVVPPPPPPPHHHHHHHHHHPPPPPPPEEEEEEEEEFFFFFFFFFFFKKKKKKKKKMMMMMMMMLLLLLLLLSSSSSSVVVVVVVRRRRRRRRRRRNNNNNNNNIIIIIIIIPPPPPPPHHHHHHHHHHMMMMMMMMSSSSSSEEEEEEEEENNNNNNNNSSSSSSLLLLLLLLAAAAAYYYYYYYYYYYYTTTTTTTTTTTTTTFFFFFFFFFFFTTTTTTTWWWWWWWWWWWWWWAAAAAGGGGLLLLLLLLLLLLLLLLKKKKKKKKKHHHHHHHHHHLLLLLLLLRRRRRRRRRRRQQQQQQQQQMMMMMMMMLLLLLLLLIIIIIIIISSSSSSNNNNNNNNAAAAAKKKKKKKKKMMMMMMMMEEEEEEEEEEEEEEEEEEGGGGIIIIIIIIDDDDDDDDRRRRRRRRRRRHHHHHHHHHHVVVVVVVWWWWWWWWWWWWWWPPPPPPPPPPPPPPLLLLLLLLSSSSSSGGGGLLLLLLLLPPPPPPPPPPPPPPLLLLLLLLSSSSSSKKKKKKKKKMMMMMMMMSSSSSSLLLLLLLLNNNNNNNNKKKKKKKKKDDDDDDDDLLLLLLLLHHHHHHHHHHFFFFFFFFFFFNNNNNNNNTTTTTTTSSSSSSIIIIIIIIAAAAANNNNNNNNLLLLLLLLVVVVVVVIIIIIIIILLLLLLLLRRRRRRRRRRRGGGGKKKKKKKKKDDDDDDDDVVVVVVVQQQQQQQQQSSSSSSAAAAADDDDDDDDVVVVVVVEEEEEEEEEGGGGFFFFFFFFFFFKKKKKKKKKDDDDDDDDPPPPPPPAAAAALLLLLLLLYYYYYYYYYYYYTTTTTTTSSSSSSWWWWWWWWWWWWWWLLLLLLLLKKKKKKKKKPPPPPPPVVVVVVVNNNNNNNNAAAAAFFFFFFFFFFFNNNNNNNNVVVVVVVWWWWWWWWWWWWWWKKKKKKKKKTTTTTTTQQQQQQQQQRRRRRRRRRRRAAAAAFFFFFFFFFFFSSSSSSKKKKKKKKKYYYYYYYYYYYYEEEEEEEEEKKKKKKKKKSSSSSSAAAAAVVVVVVVLLLLLLLLVVVVVVVSSSSSSNNNNNNNNSSSSSSQQQQQQQQQFFFFFFFFFFFLLLLLLLLVVVVVVVKKKKKKKKKPPPPPPPLLLLLLLLDDDDDDDDMMMMMMMMIIIIIIIIVVVVVVVGGGGKKKKKKKKKAAAAAWWWWWWWWWWWWWWNNNNNNNNMMMMMMMMFFFFFFFFFFFAAAAASSSSSSKKKKKKKKKAAAAAYYYYYYYYYYYYIIIIIIIIHHHHHHHHHHQQQQQQQQQYYYYYYYYYYYYTTTTTTTKKKKKKKKKFFFFFFFFFFFGGGGIIIIIIIIEEEEEEEEEEEEEEEEEEEEEEEEEEEDDDDDDDDFFFFFFFFFFFLLLLLLLLDDDDDDDDSSSSSSFFFFFFFFFFFTTTTTTTSSSSSSLLLLLLLLEEEEEEEEEQQQQQQQQQVVVVVVVVVVVVVVAAAAASSSSSSYYYYYYYYYYYYCCCCCCNNNNNNNNLLLLLLLLL

SEQ ID NO: 261 - protein, 3711 aa, Homo sapiens
MMMMMMMMTTTTTTTQQQQQQQQQSSSSSSVVVVVVVVVVVVVVVVVVVVVQQQQQQQQQVVVVVVVGGGGQQQQQQQQQCCCCCCGGGGNNNNNNNNQQQQQQQQQIIIIIIIIGGGGCCCCCCCCCCCCFFFFFFFFFFFWWWWWWWWWWWWWWDDDDDDDDLLLLLLLLAAAAALLLLLLLLRRRRRRRRRRREEEEEEEEEHHHHHHHHHHAAAAAAAAAAVVVVVVVNNNNNNNNQQQQQQQQQKKKKKKKKKGGGGIIIIIIIIYYYYYYYYYYYYDDDDDDDDEEEEEEEEEAAAAAIIIIIIIISSSSSSSSSSSSFFFFFFFFFFFFFFFFFFFFFFRRRRRRRRRRRNNNNNNNNVVVVVVVDDDDDDDDTTTTTTTRRRRRRRRRRRVVVVVVVVVVVVVVGGGGDDDDDDDDGGGGGGGGSSSSSSIIIIIIIISSSSSSKKKKKKKKKGGGGKKKKKKKKKIIIIIIIICCCCCCSSSSSSLLLLLLLLKKKKKKKKKAAAAARRRRRRRRRRRAAAAAVVVVVVVLLLLLLLLIIIIIIIIDDDDDDDDMMMMMMMMEEEEEEEEEEEEEEEEEEGGGGVVVVVVVVVVVVVVNNNNNNNNEEEEEEEEEIIIIIIIILLLLLLLLQQQQQQQQQGGGGPPPPPPPLLLLLLLLRRRRRRRRRRRDDDDDDDDVVVVVVVFFFFFFFFFFFDDDDDDDDTTTTTTTKKKKKKKKKQQQQQQQQQLLLLLLLLIIIIIIIITTTTTTTDDDDDDDDIIIIIIIISSSSSSGGGGSSSSSSGGGGNNNNNNNNNNNNNNNNWWWWWWWWWWWWWWAAAAAVVVVVVVGGGGHHHHHHHHHHKKKKKKKKKVVVVVVVFFFFFFFFFFFGGGGSSSSSSLLLLLLLLYYYYYYYYYYYYQQQQQQQQQDDDDDDDDQQQQQQQQQIIIIIIIILLLLLLLLEEEEEEEEEKKKKKKKKKFFFFFFFFFFFRRRRRRRRRRRKKKKKKKKKSSSSSSAAAAAEEEEEEEEEHHHHHHHHHHCCCCCCDDDDDDDDCCCCCCLLLLLLLLQQQQQQQQQCCCCCCFFFFFFFFFFFFFFFFFFFFFFIIIIIIIIIIIIIIIIHHHHHHHHHHSSSSSSMMMMMMMMGGGGGGGGGGGGTTTTTTTGGGGSSSSSSGGGGLLLLLLLLGGGGTTTTTTTFFFFFFFFFFFLLLLLLLLLLLLLLLLKKKKKKKKKVVVVVVVLLLLLLLLEEEEEEEEEDDDDDDDDEEEEEEEEEFFFFFFFFFFFPPPPPPPEEEEEEEEEVVVVVVVYYYYYYYYYYYYRRRRRRRRRRRFFFFFFFFFFFVVVVVVVTTTTTTTSSSSSSIIIIIIIIYYYYYYYYYYYYPPPPPPPSSSSSSGGGGEEEEEEEEEDDDDDDDDDDDDDDDDVVVVVVVIIIIIIIITTTTTTTSSSSSSPPPPPPPYYYYYYYYYYYYNNNNNNNNSSSSSSIIIIIIIILLLLLLLLAAAAAMMMMMMMMKKKKKKKKKEEEEEEEEELLLLLLLLNNNNNNNNEEEEEEEEEHHHHHHHHHHAAAAADDDDDDDDCCCCCCVVVVVVVLLLLLLLLPPPPPPPIIIIIIIIDDDDDDDDNNNNNNNNQQQQQQQQQSSSSSSLLLLLLLLFFFFFFFFFFFDDDDDDDDIIIIIIIIIIIIIIIISSSSSSKKKKKKKKKIIIIIIIIDDDDDDDDLLLLLLLLMMMMMMMMVVVVVVVNNNNNNNNSSSSSSGGGGKKKKKKKKKLLLLLLLLGGGGTTTTTTTTTTTTTTVVVVVVVKKKKKKKKKPPPPPPPKKKKKKKKKSSSSSSLLLLLLLLVVVVVVVTTTTTTTSSSSSSSSSSSSSSSSSSGGGGAAAAALLLLLLLLKKKKKKKKKKKKKKKKKKQQQQQQQQQHHHHHHHHHHKKKKKKKKKKKKKKKKKKPPPPPPPFFFFFFFFFFFDDDDDDDDAAAAAMMMMMMMMNNNNNNNNNNNNNNNNIIIIIIIIVVVVVVVAAAAANNNNNNNNLLLLLLLLLLLLLLLLLLLLLLLLNNNNNNNNLLLLLLLLTTTTTTTSSSSSSSSSSSSAAAAARRRRRRRRRRRFFFFFFFFFFFEEEEEEEEEGGGGSSSSSSLLLLLLLLNNNNNNNNMMMMMMMMDDDDDDDDLLLLLLLLNNNNNNNNEEEEEEEEEIIIIIIIISSSSSSMMMMMMMMNNNNNNNNLLLLLLLLVVVVVVVPPPPPPPFFFFFFFFFFFPPPPPPPQQQQQQQQQLLLLLLLLHHHHHHHHHHYYYYYYYYYYYYLLLLLLLLVVVVVVVSSSSSSSSSSSSLLLLLLLLTTTTTTTPPPPPPPLLLLLLLLYYYYYYYYYYYYTTTTTTTLLLLLLLLTTTTTTTDDDDDDDDVVVVVVVNNNNNNNNIIIIIIIIPPPPPPPPPPPPPPRRRRRRRRRRRRRRRRRRRRRRLLLLLLLLDDDDDDDDQQQQQQQQQMMMMMMMMFFFFFFFFFFFSSSSSSDDDDDDDDAAAAAFFFFFFFFFFFSSSSSSKKKKKKKKKDDDDDDDDHHHHHHHHHHQQQQQQQQQLLLLLLLLLLLLLLLLRRRRRRRRRRRAAAAADDDDDDDDPPPPPPPKKKKKKKKKHHHHHHHHHHSSSSSSLLLLLLLLYYYYYYYYYYYYLLLLLLLLAAAAACCCCCCAAAAALLLLLLLLMMMMMMMMVVVVVVVRRRRRRRRRRRGGGGNNNNNNNNVVVVVVVQQQQQQQQQIIIIIIIISSSSSSDDDDDDDDLLLLLLLLRRRRRRRRRRRRRRRRRRRRRRNNNNNNNNIIIIIIIIEEEEEEEEERRRRRRRRRRRLLLLLLLLKKKKKKKKKPPPPPPPSSSSSSLLLLLLLLQQQQQQQQQFFFFFFFFFFFVVVVVVVSSSSSSWWWWWWWWWWWWWWNNNNNNNNQQQQQQQQQEEEEEEEEEGGGGWWWWWWWWWWWWWWKKKKKKKKKTTTTTTTSSSSSSLLLLLLLLCCCCCCSSSSSSVVVVVVVPPPPPPPPPPPPPPVVVVVVVGGGGHHHHHHHHHHSSSSSSHHHHHHHHHHSSSSSSLLLLLLLLLLLLLLLLAAAAALLLLLLLLAAAAANNNNNNNNNNNNNNNNTTTTTTTCCCCCCVVVVVVVKKKKKKKKKPPPPPPPTTTTTTTFFFFFFFFFFFMMMMMMMMEEEEEEEEELLLLLLLLKKKKKKKKKEEEEEEEEERRRRRRRRRRRFFFFFFFFFFFMMMMMMMMRRRRRRRRRRRLLLLLLLLYYYYYYYYYYYYKKKKKKKKKKKKKKKKKKKKKKKKKKKAAAAAHHHHHHHHHHLLLLLLLLHHHHHHHHHHHHHHHHHHHHYYYYYYYYYYYYLLLLLLLLQQQQQQQQQVVVVVVVEEEEEEEEEGGGGMMMMMMMMEEEEEEEEEEEEEEEEEESSSSSSCCCCCCFFFFFFFFFFFTTTTTTTEEEEEEEEEAAAAAVVVVVVVSSSSSSSSSSSSLLLLLLLLSSSSSSAAAAALLLLLLLLIIIIIIIIQQQQQQQQQEEEEEEEEEYYYYYYYYYYYYDDDDDDDDQQQQQQQQQLLLLLLLLDDDDDDDDAAAAATTTTTTTKKKKKKKKKNNNNNNNNMMMMMMMMPPPPPPPVVVVVVVQQQQQQQQQDDDDDDDDLLLLLLLLPPPPPPPRRRRRRRRRRRLLLLLLLLSSSSSSIIIIIIIIAAAAAMMMMMMMMM

SEQ ID NO: 262 - protein, 3600 aa, Homo sapiens
MMMMMMMMPPPPPPPRRRRRRRRRRREEEEEEEEEIIIIIIIIIIIIIIIITTTTTTTLLLLLLLLQQQQQQQQQLLLLLLLLGGGGQQQQQQQQQCCCCCCGGGGNNNNNNNNQQQQQQQQQIIIIIIIIGGGGFFFFFFFFFFFEEEEEEEEEFFFFFFFFFFFWWWWWWWWWWWWWWKKKKKKKKKQQQQQQQQQLLLLLLLLCCCCCCAAAAAEEEEEEEEEHHHHHHHHHHGGGGIIIIIIIISSSSSSPPPPPPPEEEEEEEEEGGGGIIIIIIIIVVVVVVVEEEEEEEEEEEEEEEEEEFFFFFFFFFFFAAAAATTTTTTTEEEEEEEEEGGGGTTTTTTTDDDDDDDDRRRRRRRRRRRKKKKKKKKKDDDDDDDDVVVVVVVFFFFFFFFFFFFFFFFFFFFFFYYYYYYYYYYYYQQQQQQQQQAAAAADDDDDDDDDDDDDDDDEEEEEEEEEHHHHHHHHHHYYYYYYYYYYYYIIIIIIIIPPPPPPPRRRRRRRRRRRAAAAAVVVVVVVLLLLLLLLLLLLLLLLDDDDDDDDLLLLLLLLEEEEEEEEEPPPPPPPRRRRRRRRRRRVVVVVVVIIIIIIIIHHHHHHHHHHSSSSSSIIIIIIIILLLLLLLLNNNNNNNNSSSSSSPPPPPPPYYYYYYYYYYYYAAAAAKKKKKKKKKLLLLLLLLYYYYYYYYYYYYNNNNNNNNPPPPPPPEEEEEEEEENNNNNNNNIIIIIIIIYYYYYYYYYYYYLLLLLLLLSSSSSSEEEEEEEEEHHHHHHHHHHGGGGGGGGGGGGAAAAAGGGGNNNNNNNNNNNNNNNNWWWWWWWWWWWWWWAAAAASSSSSSGGGGFFFFFFFFFFFSSSSSSQQQQQQQQQGGGGEEEEEEEEEKKKKKKKKKIIIIIIIIHHHHHHHHHHEEEEEEEEEDDDDDDDDIIIIIIIIFFFFFFFFFFFDDDDDDDDIIIIIIIIIIIIIIIIDDDDDDDDRRRRRRRRRRREEEEEEEEEAAAAADDDDDDDDGGGGSSSSSSDDDDDDDDSSSSSSLLLLLLLLEEEEEEEEEGGGGFFFFFFFFFFFVVVVVVVLLLLLLLLCCCCCCHHHHHHHHHHSSSSSSIIIIIIIIAAAAAGGGGGGGGTTTTTTTGGGGSSSSSSGGGGLLLLLLLLGGGGSSSSSSYYYYYYYYYYYYLLLLLLLLLLLLLLLLEEEEEEEEERRRRRRRRRRRLLLLLLLLNNNNNNNNDDDDDDDDRRRRRRRRRRRYYYYYYYYYYYYPPPPPPPKKKKKKKKKKKKKKKKKKLLLLLLLLVVVVVVVQQQQQQQQQTTTTTTTYYYYYYYYYYYYSSSSSSVVVVVVVFFFFFFFFFFFPPPPPPPNNNNNNNNQQQQQQQQQDDDDDDDDEEEEEEEEEMMMMMMMMSSSSSSDDDDDDDDVVVVVVVVVVVVVVVVVVVVVQQQQQQQQQPPPPPPPYYYYYYYYYYYYNNNNNNNNSSSSSSLLLLLLLLLLLLLLLLTTTTTTTLLLLLLLLKKKKKKKKKRRRRRRRRRRRLLLLLLLLTTTTTTTQQQQQQQQQNNNNNNNNAAAAADDDDDDDDCCCCCCVVVVVVVVVVVVVVVVVVVVVLLLLLLLLDDDDDDDDNNNNNNNNTTTTTTTAAAAALLLLLLLLNNNNNNNNRRRRRRRRRRRIIIIIIIIAAAAATTTTTTTDDDDDDDDRRRRRRRRRRRLLLLLLLLHHHHHHHHHHIIIIIIIIQQQQQQQQQNNNNNNNNPPPPPPPSSSSSSFFFFFFFFFFFSSSSSSQQQQQQQQQIIIIIIIINNNNNNNNQQQQQQQQQLLLLLLLLVVVVVVVSSSSSSTTTTTTTIIIIIIIIMMMMMMMMSSSSSSAAAAASSSSSSTTTTTTTTTTTTTTTTTTTTTLLLLLLLLRRRRRRRRRRRYYYYYYYYYYYYPPPPPPPGGGGYYYYYYYYYYYYMMMMMMMMNNNNNNNNNNNNNNNNDDDDDDDDLLLLLLLLIIIIIIIIGGGGLLLLLLLLIIIIIIIIAAAAASSSSSSLLLLLLLLIIIIIIIIPPPPPPPTTTTTTTPPPPPPPRRRRRRRRRRRLLLLLLLLHHHHHHHHHHFFFFFFFFFFFLLLLLLLLMMMMMMMMTTTTTTTGGGGYYYYYYYYYYYYTTTTTTTPPPPPPPLLLLLLLLTTTTTTTTTTTTTTDDDDDDDDQQQQQQQQQSSSSSSVVVVVVVAAAAASSSSSSVVVVVVVRRRRRRRRRRRKKKKKKKKKTTTTTTTTTTTTTTVVVVVVVLLLLLLLLDDDDDDDDVVVVVVVMMMMMMMMRRRRRRRRRRRRRRRRRRRRRRLLLLLLLLLLLLLLLLQQQQQQQQQPPPPPPPKKKKKKKKKNNNNNNNNVVVVVVVMMMMMMMMVVVVVVVSSSSSSTTTTTTTGGGGRRRRRRRRRRRDDDDDDDDRRRRRRRRRRRQQQQQQQQQTTTTTTTNNNNNNNNHHHHHHHHHHCCCCCCYYYYYYYYYYYYIIIIIIIIAAAAAIIIIIIIILLLLLLLLNNNNNNNNIIIIIIIIIIIIIIIIQQQQQQQQQGGGGEEEEEEEEEVVVVVVVDDDDDDDDPPPPPPPTTTTTTTQQQQQQQQQVVVVVVVHHHHHHHHHHKKKKKKKKKSSSSSSLLLLLLLLQQQQQQQQQRRRRRRRRRRRIIIIIIIIRRRRRRRRRRREEEEEEEEERRRRRRRRRRRKKKKKKKKKLLLLLLLLAAAAANNNNNNNNFFFFFFFFFFFIIIIIIIIPPPPPPPWWWWWWWWWWWWWWGGGGPPPPPPPAAAAASSSSSSIIIIIIIIQQQQQQQQQVVVVVVVAAAAALLLLLLLLSSSSSSRRRRRRRRRRRKKKKKKKKKSSSSSSPPPPPPPYYYYYYYYYYYYLLLLLLLLPPPPPPPSSSSSSAAAAAHHHHHHHHHHRRRRRRRRRRRVVVVVVVSSSSSSGGGGLLLLLLLLMMMMMMMMMMMMMMMMAAAAANNNNNNNNHHHHHHHHHHTTTTTTTSSSSSSIIIIIIIISSSSSSSSSSSSLLLLLLLLFFFFFFFFFFFEEEEEEEEERRRRRRRRRRRTTTTTTTCCCCCCRRRRRRRRRRRQQQQQQQQQYYYYYYYYYYYYDDDDDDDDKKKKKKKKKLLLLLLLLRRRRRRRRRRRKKKKKKKKKRRRRRRRRRRREEEEEEEEEAAAAAFFFFFFFFFFFLLLLLLLLEEEEEEEEEQQQQQQQQQFFFFFFFFFFFRRRRRRRRRRRKKKKKKKKKEEEEEEEEEDDDDDDDDMMMMMMMMFFFFFFFFFFFKKKKKKKKKDDDDDDDDNNNNNNNNFFFFFFFFFFFDDDDDDDDEEEEEEEEEMMMMMMMMDDDDDDDDTTTTTTTSSSSSSRRRRRRRRRRREEEEEEEEEIIIIIIIIVVVVVVVQQQQQQQQQQQQQQQQQQLLLLLLLLIIIIIIIIDDDDDDDDEEEEEEEEEYYYYYYYYYYYYHHHHHHHHHHAAAAAAAAAATTTTTTTRRRRRRRRRRRPPPPPPPDDDDDDDDYYYYYYYYYYYYIIIIIIIISSSSSSWWWWWWWWWWWWWWGGGGTTTTTTTQQQQQQQQQEEEEEEEEEQQQQQQQQQQ

SEQ ID NO: 263 - protein, 3719 aa, Zea mays
MMMMMMMMPPPPPPPRRRRRRRRRRREEEEEEEEEIIIIIIIIIIIIIIIITTTTTTTIIIIIIIIQQQQQQQQQVVVVVVVGGGGQQQQQQQQQCCCCCCGGGGNNNNNNNNQQQQQQQQQIIIIIIIIGGGGMMMMMMMMEEEEEEEEEFFFFFFFFFFFWWWWWWWWWWWWWWKKKKKKKKKQQQQQQQQQLLLLLLLLCCCCCCLLLLLLLLEEEEEEEEEHHHHHHHHHHGGGGIIIIIIIIGGGGKKKKKKKKKDDDDDDDDGGGGLLLLLLLLLLLLLLLLEEEEEEEEEDDDDDDDDFFFFFFFFFFFAAAAATTTTTTTQQQQQQQQQGGGGGGGGDDDDDDDDRRRRRRRRRRRKKKKKKKKKDDDDDDDDVVVVVVVFFFFFFFFFFFFFFFFFFFFFFYYYYYYYYYYYYQQQQQQQQQAAAAADDDDDDDDDDDDDDDDQQQQQQQQQHHHHHHHHHHFFFFFFFFFFFIIIIIIIIPPPPPPPRRRRRRRRRRRSSSSSSLLLLLLLLLLLLLLLLIIIIIIIIDDDDDDDDLLLLLLLLEEEEEEEEEPPPPPPPRRRRRRRRRRRVVVVVVVIIIIIIIINNNNNNNNGGGGIIIIIIIIQQQQQQQQQNNNNNNNNSSSSSSEEEEEEEEEYYYYYYYYYYYYRRRRRRRRRRRNNNNNNNNLLLLLLLLYYYYYYYYYYYYNNNNNNNNHHHHHHHHHHEEEEEEEEENNNNNNNNIIIIIIIIFFFFFFFFFFFVVVVVVVAAAAAEEEEEEEEEHHHHHHHHHHGGGGGGGGGGGGAAAAAGGGGNNNNNNNNNNNNNNNNWWWWWWWWWWWWWWAAAAASSSSSSGGGGYYYYYYYYYYYYHHHHHHHHHHQQQQQQQQQGGGGEEEEEEEEEQQQQQQQQQFFFFFFFFFFFVVVVVVVDDDDDDDDDDDDDDDDIIIIIIIIMMMMMMMMDDDDDDDDMMMMMMMMVVVVVVVDDDDDDDDRRRRRRRRRRREEEEEEEEEAAAAADDDDDDDDGGGGSSSSSSDDDDDDDDSSSSSSLLLLLLLLEEEEEEEEEGGGGFFFFFFFFFFFVVVVVVVLLLLLLLLCCCCCCHHHHHHHHHHSSSSSSIIIIIIIIAAAAAGGGGGGGGTTTTTTTGGGGSSSSSSGGGGMMMMMMMMGGGGSSSSSSYYYYYYYYYYYYLLLLLLLLLLLLLLLLEEEEEEEEETTTTTTTLLLLLLLLNNNNNNNNDDDDDDDDRRRRRRRRRRRYYYYYYYYYYYYSSSSSSKKKKKKKKKKKKKKKKKKLLLLLLLLVVVVVVVQQQQQQQQQTTTTTTTYYYYYYYYYYYYSSSSSSVVVVVVVFFFFFFFFFFFPPPPPPPNNNNNNNNQQQQQQQQQVVVVVVVEEEEEEEEETTTTTTTSSSSSSDDDDDDDDVVVVVVVVVVVVVVVVVVVVVQQQQQQQQQPPPPPPPYYYYYYYYYYYYNNNNNNNNSSSSSSLLLLLLLLLLLLLLLLTTTTTTTLLLLLLLLKKKKKKKKKRRRRRRRRRRRLLLLLLLLTTTTTTTLLLLLLLLNNNNNNNNAAAAADDDDDDDDCCCCCCVVVVVVVVVVVVVVVVVVVVVLLLLLLLLDDDDDDDDNNNNNNNNTTTTTTTAAAAALLLLLLLLNNNNNNNNRRRRRRRRRRRIIIIIIIIAAAAAVVVVVVVEEEEEEEEERRRRRRRRRRRLLLLLLLLHHHHHHHHHHLLLLLLLLSSSSSSNNNNNNNNPPPPPPPTTTTTTTFFFFFFFFFFFAAAAAQQQQQQQQQTTTTTTTNNNNNNNNSSSSSSLLLLLLLLVVVVVVVSSSSSSTTTTTTTVVVVVVVMMMMMMMMSSSSSSAAAAASSSSSSTTTTTTTTTTTTTTTTTTTTTLLLLLLLLRRRRRRRRRRRYYYYYYYYYYYYPPPPPPPGGGGYYYYYYYYYYYYMMMMMMMMNNNNNNNNNNNNNNNNDDDDDDDDLLLLLLLLVVVVVVVGGGGLLLLLLLLLLLLLLLLAAAAASSSSSSLLLLLLLLIIIIIIIIPPPPPPPTTTTTTTPPPPPPPRRRRRRRRRRRCCCCCCHHHHHHHHHHFFFFFFFFFFFLLLLLLLLMMMMMMMMTTTTTTTGGGGYYYYYYYYYYYYTTTTTTTPPPPPPPLLLLLLLLTTTTTTTVVVVVVVEEEEEEEEERRRRRRRRRRRQQQQQQQQQVVVVVVVNNNNNNNNMMMMMMMMIIIIIIIIRRRRRRRRRRRKKKKKKKKKTTTTTTTTTTTTTTVVVVVVVLLLLLLLLDDDDDDDDVVVVVVVMMMMMMMMRRRRRRRRRRRRRRRRRRRRRRLLLLLLLLLLLLLLLLQQQQQQQQQTTTTTTTKKKKKKKKKNNNNNNNNIIIIIIIIMMMMMMMMVVVVVVVSSSSSSSSSSSSYYYYYYYYYYYYAAAAARRRRRRRRRRRTTTTTTTKKKKKKKKKEEEEEEEEEAAAAASSSSSSQQQQQQQQQAAAAAKKKKKKKKKYYYYYYYYYYYYIIIIIIIISSSSSSIIIIIIIILLLLLLLLNNNNNNNNIIIIIIIIIIIIIIIIQQQQQQQQQGGGGEEEEEEEEEVVVVVVVDDDDDDDDPPPPPPPTTTTTTTQQQQQQQQQVVVVVVVHHHHHHHHHHEEEEEEEEESSSSSSLLLLLLLLQQQQQQQQQRRRRRRRRRRRIIIIIIIIRRRRRRRRRRREEEEEEEEERRRRRRRRRRRKKKKKKKKKLLLLLLLLVVVVVVVNNNNNNNNFFFFFFFFFFFIIIIIIIIYYYYYYYYYYYYWWWWWWWWWWWWWWAAAAAPPPPPPPAAAAASSSSSSIIIIIIIIQQQQQQQQQVVVVVVVAAAAALLLLLLLLSSSSSSRRRRRRRRRRRKKKKKKKKKSSSSSSPPPPPPPYYYYYYYYYYYYVVVVVVVQQQQQQQQQTTTTTTTTTTTTTTHHHHHHHHHHRRRRRRRRRRRVVVVVVVSSSSSSGGGGLLLLLLLLMMMMMMMMLLLLLLLLAAAAANNNNNNNNHHHHHHHHHHTTTTTTTSSSSSSIIIIIIIIRRRRRRRRRRRHHHHHHHHHHLLLLLLLLFFFFFFFFFFFSSSSSSKKKKKKKKKCCCCCCLLLLLLLLGGGGQQQQQQQQQYYYYYYYYYYYYEEEEEEEEEKKKKKKKKKLLLLLLLLRRRRRRRRRRRKKKKKKKKKKKKKKKKKKQQQQQQQQQAAAAAFFFFFFFFFFFLLLLLLLLDDDDDDDDNNNNNNNNYYYYYYYYYYYYRRRRRRRRRRRKKKKKKKKKFFFFFFFFFFFPPPPPPPMMMMMMMMFFFFFFFFFFFAAAAADDDDDDDDNNNNNNNNDDDDDDDDLLLLLLLLSSSSSSEEEEEEEEEFFFFFFFFFFFDDDDDDDDEEEEEEEEESSSSSSRRRRRRRRRRREEEEEEEEEIIIIIIIIIIIIIIIIEEEEEEEEESSSSSSLLLLLLLLVVVVVVVDDDDDDDDEEEEEEEEEYYYYYYYYYYYYKKKKKKKKKAAAAACCCCCCEEEEEEEEESSSSSSPPPPPPPDDDDDDDDYYYYYYYYYYYYIIIIIIIIKKKKKKKKKWWWWWWWWWWWWWWGGGGMMMMMMMMEEEEEEEEEDDDDDDDDPPPPPPPGGGGEEEEEEEEEAAAAANNNNNNNNVVVVVVVVVVVVVVAAAAAAAAAALLLLLLLLDDDDDDDDSSSSSSKKKKKKKKKLLLLLLLLVVVVVVVVVVVVVVV

SEQ ID NO: 264 - protein, 3595 aa, Mus musculus
MMMMMMMMPPPPPPPRRRRRRRRRRREEEEEEEEEIIIIIIIIIIIIIIIITTTTTTTLLLLLLLLQQQQQQQQQLLLLLLLLGGGGQQQQQQQQQCCCCCCGGGGNNNNNNNNQQQQQQQQQIIIIIIIIGGGGFFFFFFFFFFFEEEEEEEEEFFFFFFFFFFFWWWWWWWWWWWWWWKKKKKKKKKQQQQQQQQQLLLLLLLLCCCCCCAAAAAEEEEEEEEEHHHHHHHHHHGGGGIIIIIIIISSSSSSPPPPPPPEEEEEEEEEGGGGIIIIIIIIVVVVVVVEEEEEEEEEEEEEEEEEEFFFFFFFFFFFAAAAATTTTTTTEEEEEEEEEGGGGTTTTTTTDDDDDDDDRRRRRRRRRRRKKKKKKKKKDDDDDDDDVVVVVVVFFFFFFFFFFFFFFFFFFFFFFYYYYYYYYYYYYQQQQQQQQQAAAAADDDDDDDDDDDDDDDDEEEEEEEEEHHHHHHHHHHYYYYYYYYYYYYIIIIIIIIPPPPPPPRRRRRRRRRRRAAAAAVVVVVVVLLLLLLLLLLLLLLLLDDDDDDDDLLLLLLLLEEEEEEEEEPPPPPPPRRRRRRRRRRRVVVVVVVIIIIIIIIHHHHHHHHHHSSSSSSIIIIIIIILLLLLLLLNNNNNNNNSSSSSSSSSSSSYYYYYYYYYYYYAAAAAKKKKKKKKKLLLLLLLLYYYYYYYYYYYYNNNNNNNNPPPPPPPEEEEEEEEENNNNNNNNIIIIIIIIYYYYYYYYYYYYLLLLLLLLSSSSSSEEEEEEEEEHHHHHHHHHHGGGGGGGGGGGGAAAAAGGGGNNNNNNNNNNNNNNNNWWWWWWWWWWWWWWAAAAASSSSSSGGGGFFFFFFFFFFFSSSSSSQQQQQQQQQGGGGEEEEEEEEEKKKKKKKKKIIIIIIIIHHHHHHHHHHEEEEEEEEEDDDDDDDDIIIIIIIIFFFFFFFFFFFDDDDDDDDIIIIIIIIIIIIIIIIDDDDDDDDRRRRRRRRRRREEEEEEEEEAAAAADDDDDDDDGGGGSSSSSSDDDDDDDDSSSSSSLLLLLLLLEEEEEEEEEGGGGFFFFFFFFFFFVVVVVVVLLLLLLLLCCCCCCHHHHHHHHHHSSSSSSIIIIIIIIAAAAAGGGGGGGGTTTTTTTGGGGSSSSSSGGGGLLLLLLLLGGGGSSSSSSYYYYYYYYYYYYLLLLLLLLLLLLLLLLEEEEEEEEERRRRRRRRRRRLLLLLLLLNNNNNNNNDDDDDDDDRRRRRRRRRRRYYYYYYYYYYYYPPPPPPPKKKKKKKKKKKKKKKKKKLLLLLLLLVVVVVVVQQQQQQQQQTTTTTTTYYYYYYYYYYYYSSSSSSVVVVVVVFFFFFFFFFFFPPPPPPPNNNNNNNNQQQQQQQQQDDDDDDDDEEEEEEEEEMMMMMMMMSSSSSSDDDDDDDDVVVVVVVVVVVVVVVVVVVVVQQQQQQQQQPPPPPPPYYYYYYYYYYYYNNNNNNNNSSSSSSLLLLLLLLLLLLLLLLTTTTTTTLLLLLLLLKKKKKKKKKRRRRRRRRRRRLLLLLLLLTTTTTTTQQQQQQQQQNNNNNNNNAAAAADDDDDDDDCCCCCCVVVVVVVVVVVVVVVVVVVVVLLLLLLLLDDDDDDDDNNNNNNNNTTTTTTTAAAAALLLLLLLLNNNNNNNNLLLLLLLLIIIIIIIIAAAAATTTTTTTDDDDDDDDRRRRRRRRRRRLLLLLLLLHHHHHHHHHHIIIIIIIIQQQQQQQQQNNNNNNNNPPPPPPPSSSSSSFFFFFFFFFFFSSSSSSQQQQQQQQQIIIIIIIINNNNNNNNQQQQQQQQQLLLLLLLLVVVVVVVSSSSSSTTTTTTTIIIIIIIIMMMMMMMMSSSSSSAAAAASSSSSSTTTTTTTTTTTTTTTTTTTTTLLLLLLLLRRRRRRRRRRRYYYYYYYYYYYYPPPPPPPGGGGYYYYYYYYYYYYMMMMMMMMNNNNNNNNNNNNNNNNDDDDDDDDLLLLLLLLIIIIIIIIGGGGLLLLLLLLIIIIIIIIAAAAASSSSSSLLLLLLLLIIIIIIIIPPPPPPPTTTTTTTPPPPPPPRRRRRRRRRRRLLLLLLLLHHHHHHHHHHFFFFFFFFFFFLLLLLLLLMMMMMMMMTTTTTTTGGGGYYYYYYYYYYYYTTTTTTTPPPPPPPLLLLLLLLTTTTTTTTTTTTTTDDDDDDDDQQQQQQQQQSSSSSSVVVVVVVAAAAASSSSSSVVVVVVVRRRRRRRRRRRKKKKKKKKKTTTTTTTTTTTTTTVVVVVVVLLLLLLLLDDDDDDDDVVVVVVVMMMMMMMMRRRRRRRRRRRRRRRRRRRRRRLLLLLLLLLLLLLLLLQQQQQQQQQPPPPPPPKKKKKKKKKNNNNNNNNVVVVVVVMMMMMMMMVVVVVVVSSSSSSTTTTTTTGGGGRRRRRRRRRRRDDDDDDDDRRRRRRRRRRRQQQQQQQQQTTTTTTTNNNNNNNNHHHHHHHHHHCCCCCCYYYYYYYYYYYYIIIIIIIIAAAAAIIIIIIIILLLLLLLLNNNNNNNNIIIIIIIIIIIIIIIIQQQQQQQQQGGGGEEEEEEEEEVVVVVVVDDDDDDDDPPPPPPPTTTTTTTQQQQQQQQQVVVVVVVHHHHHHHHHHKKKKKKKKKSSSSSSLLLLLLLLQQQQQQQQQRRRRRRRRRRRIIIIIIIIRRRRRRRRRRREEEEEEEEERRRRRRRRRRRKKKKKKKKKLLLLLLLLAAAAANNNNNNNNFFFFFFFFFFFIIIIIIIIPPPPPPPWWWWWWWWWWWWWWGGGGPPPPPPPAAAAASSSSSSIIIIIIIIQQQQQQQQQVVVVVVVAAAAALLLLLLLLSSSSSSRRRRRRRRRRRKKKKKKKKKSSSSSSPPPPPPPYYYYYYYYYYYYLLLLLLLLPPPPPPPSSSSSSAAAAAHHHHHHHHHHRRRRRRRRRRRVVVVVVVSSSSSSGGGGLLLLLLLLMMMMMMMMMMMMMMMMAAAAANNNNNNNNHHHHHHHHHHTTTTTTTSSSSSSIIIIIIIISSSSSSSSSSSSLLLLLLLLFFFFFFFFFFFEEEEEEEEERRRRRRRRRRRTTTTTTTCCCCCCRRRRRRRRRRRQQQQQQQQQFFFFFFFFFFFDDDDDDDDKKKKKKKKKLLLLLLLLRRRRRRRRRRRKKKKKKKKKRRRRRRRRRRREEEEEEEEEAAAAAFFFFFFFFFFFMMMMMMMMEEEEEEEEEQQQQQQQQQFFFFFFFFFFFRRRRRRRRRRRKKKKKKKKKEEEEEEEEEDDDDDDDDIIIIIIIIFFFFFFFFFFFKKKKKKKKKDDDDDDDDNNNNNNNNFFFFFFFFFFFDDDDDDDDEEEEEEEEEMMMMMMMMDDDDDDDDTTTTTTTSSSSSSRRRRRRRRRRREEEEEEEEEIIIIIIIIVVVVVVVQQQQQQQQQQQQQQQQQQLLLLLLLLIIIIIIIIDDDDDDDDEEEEEEEEEYYYYYYYYYYYYHHHHHHHHHHAAAAAAAAAATTTTTTTRRRRRRRRRRRPPPPPPPDDDDDDDDYYYYYYYYYYYYIIIIIIIISSSSSSWWWWWWWWWWWWWWGGGGTTTTTTTQQQQQQQQQEEEEEEEEEQQQQQQQQQQ

SEQ ID NO: 265 - protein, 3741 aa, Arabidopsis thaliana
MMMMMMMMPPPPPPPRRRRRRRRRRREEEEEEEEEIIIIIIIIIIIIIIIITTTTTTTLLLLLLLLQQQQQQQQQVVVVVVVGGGGQQQQQQQQQCCCCCCGGGGNNNNNNNNQQQQQQQQQIIIIIIIIGGGGMMMMMMMMEEEEEEEEEFFFFFFFFFFFWWWWWWWWWWWWWWKKKKKKKKKQQQQQQQQQLLLLLLLLCCCCCCLLLLLLLLEEEEEEEEEHHHHHHHHHHGGGGIIIIIIIISSSSSSKKKKKKKKKDDDDDDDDGGGGIIIIIIIILLLLLLLLEEEEEEEEEDDDDDDDDFFFFFFFFFFFAAAAATTTTTTTQQQQQQQQQGGGGGGGGDDDDDDDDRRRRRRRRRRRKKKKKKKKKDDDDDDDDVVVVVVVFFFFFFFFFFFFFFFFFFFFFFYYYYYYYYYYYYQQQQQQQQQAAAAADDDDDDDDDDDDDDDDQQQQQQQQQHHHHHHHHHHYYYYYYYYYYYYIIIIIIIIPPPPPPPRRRRRRRRRRRAAAAALLLLLLLLLLLLLLLLIIIIIIIIDDDDDDDDLLLLLLLLEEEEEEEEEPPPPPPPRRRRRRRRRRRVVVVVVVIIIIIIIINNNNNNNNGGGGIIIIIIIIQQQQQQQQQNNNNNNNNGGGGEEEEEEEEEYYYYYYYYYYYYRRRRRRRRRRRNNNNNNNNLLLLLLLLYYYYYYYYYYYYNNNNNNNNHHHHHHHHHHEEEEEEEEENNNNNNNNIIIIIIIIFFFFFFFFFFFLLLLLLLLSSSSSSDDDDDDDDHHHHHHHHHHGGGGGGGGGGGGAAAAAGGGGNNNNNNNNNNNNNNNNWWWWWWWWWWWWWWAAAAASSSSSSGGGGYYYYYYYYYYYYHHHHHHHHHHQQQQQQQQQGGGGKKKKKKKKKGGGGVVVVVVVEEEEEEEEEEEEEEEEEEEEEEEEEEEIIIIIIIIMMMMMMMMDDDDDDDDMMMMMMMMIIIIIIIIDDDDDDDDRRRRRRRRRRREEEEEEEEEAAAAADDDDDDDDGGGGSSSSSSDDDDDDDDSSSSSSLLLLLLLLEEEEEEEEEGGGGFFFFFFFFFFFVVVVVVVLLLLLLLLCCCCCCHHHHHHHHHHSSSSSSIIIIIIIIAAAAAGGGGGGGGTTTTTTTGGGGSSSSSSGGGGMMMMMMMMGGGGSSSSSSYYYYYYYYYYYYLLLLLLLLLLLLLLLLEEEEEEEEETTTTTTTLLLLLLLLNNNNNNNNDDDDDDDDRRRRRRRRRRRYYYYYYYYYYYYSSSSSSKKKKKKKKKKKKKKKKKKLLLLLLLLVVVVVVVQQQQQQQQQTTTTTTTYYYYYYYYYYYYSSSSSSVVVVVVVFFFFFFFFFFFPPPPPPPNNNNNNNNQQQQQQQQQMMMMMMMMEEEEEEEEETTTTTTTSSSSSSDDDDDDDDVVVVVVVVVVVVVVVVVVVVVQQQQQQQQQPPPPPPPYYYYYYYYYYYYNNNNNNNNSSSSSSLLLLLLLLLLLLLLLLTTTTTTTLLLLLLLLKKKKKKKKKRRRRRRRRRRRLLLLLLLLTTTTTTTLLLLLLLLNNNNNNNNAAAAADDDDDDDDCCCCCCVVVVVVVVVVVVVVVVVVVVVLLLLLLLLDDDDDDDDNNNNNNNNTTTTTTTAAAAALLLLLLLLNNNNNNNNRRRRRRRRRRRIIIIIIIIAAAAAVVVVVVVEEEEEEEEERRRRRRRRRRRLLLLLLLLHHHHHHHHHHLLLLLLLLTTTTTTTNNNNNNNNPPPPPPPTTTTTTTFFFFFFFFFFFAAAAAQQQQQQQQQTTTTTTTNNNNNNNNSSSSSSLLLLLLLLVVVVVVVSSSSSSTTTTTTTVVVVVVVMMMMMMMMSSSSSSAAAAASSSSSSTTTTTTTTTTTTTTTTTTTTTLLLLLLLLRRRRRRRRRRRYYYYYYYYYYYYPPPPPPPGGGGYYYYYYYYYYYYMMMMMMMMNNNNNNNNNNNNNNNNDDDDDDDDLLLLLLLLVVVVVVVGGGGLLLLLLLLLLLLLLLLAAAAASSSSSSLLLLLLLLIIIIIIIIPPPPPPPTTTTTTTPPPPPPPRRRRRRRRRRRCCCCCCHHHHHHHHHHFFFFFFFFFFFLLLLLLLLMMMMMMMMTTTTTTTGGGGYYYYYYYYYYYYTTTTTTTPPPPPPPLLLLLLLLTTTTTTTVVVVVVVEEEEEEEEERRRRRRRRRRRQQQQQQQQQAAAAANNNNNNNNVVVVVVVIIIIIIIIRRRRRRRRRRRKKKKKKKKKTTTTTTTTTTTTTTVVVVVVVLLLLLLLLDDDDDDDDVVVVVVVMMMMMMMMRRRRRRRRRRRRRRRRRRRRRRLLLLLLLLLLLLLLLLQQQQQQQQQTTTTTTTKKKKKKKKKNNNNNNNNIIIIIIIIMMMMMMMMVVVVVVVSSSSSSSSSSSSYYYYYYYYYYYYAAAAARRRRRRRRRRRNNNNNNNNKKKKKKKKKEEEEEEEEEAAAAASSSSSSQQQQQQQQQAAAAAKKKKKKKKKYYYYYYYYYYYYIIIIIIIISSSSSSIIIIIIIILLLLLLLLNNNNNNNNIIIIIIIIIIIIIIIIQQQQQQQQQGGGGEEEEEEEEEVVVVVVVDDDDDDDDPPPPPPPTTTTTTTQQQQQQQQQVVVVVVVHHHHHHHHHHEEEEEEEEESSSSSSLLLLLLLLQQQQQQQQQRRRRRRRRRRRIIIIIIIIRRRRRRRRRRREEEEEEEEERRRRRRRRRRRKKKKKKKKKLLLLLLLLVVVVVVVNNNNNNNNFFFFFFFFFFFIIIIIIIIDDDDDDDDWWWWWWWWWWWWWWGGGGPPPPPPPAAAAASSSSSSIIIIIIIIQQQQQQQQQVVVVVVVAAAAALLLLLLLLSSSSSSKKKKKKKKKKKKKKKKKKSSSSSSPPPPPPPYYYYYYYYYYYYVVVVVVVQQQQQQQQQTTTTTTTSSSSSSHHHHHHHHHHRRRRRRRRRRRVVVVVVVSSSSSSGGGGLLLLLLLLMMMMMMMMLLLLLLLLAAAAASSSSSSHHHHHHHHHHTTTTTTTSSSSSSIIIIIIIIRRRRRRRRRRRHHHHHHHHHHLLLLLLLLFFFFFFFFFFFSSSSSSRRRRRRRRRRRCCCCCCLLLLLLLLSSSSSSQQQQQQQQQYYYYYYYYYYYYDDDDDDDDKKKKKKKKKLLLLLLLLRRRRRRRRRRRKKKKKKKKKKKKKKKKKKQQQQQQQQQAAAAAFFFFFFFFFFFLLLLLLLLDDDDDDDDNNNNNNNNYYYYYYYYYYYYRRRRRRRRRRRKKKKKKKKKFFFFFFFFFFFPPPPPPPMMMMMMMMFFFFFFFFFFFAAAAADDDDDDDDNNNNNNNNDDDDDDDDLLLLLLLLSSSSSSEEEEEEEEEFFFFFFFFFFFDDDDDDDDEEEEEEEEESSSSSSRRRRRRRRRRRDDDDDDDDIIIIIIIIIIIIIIIIEEEEEEEEESSSSSSLLLLLLLLVVVVVVVDDDDDDDDEEEEEEEEEYYYYYYYYYYYYKKKKKKKKKAAAAACCCCCCEEEEEEEEESSSSSSPPPPPPPDDDDDDDDYYYYYYYYYYYYIIIIIIIIKKKKKKKKKWWWWWWWWWWWWWWGGGGMMMMMMMMEEEEEEEEEDDDDDDDDPPPPPPPGGGGQQQQQQQQQLLLLLLLLMMMMMMMMTTTTTTTGGGGEEEEEEEEEGGGGNNNNNNNNAAAAASSSSSSGGGGVVVVVVVAAAAADDDDDDDDPPPPPPPKKKKKKKKKLLLLLLLLAAAAAFFFFFFFFFFFF

SEQ ID NO: 266 - protein, 3601 aa, Drosophila melanogaster
MMMMMMMMPPPPPPPSSSSSSEEEEEEEEEIIIIIIIIIIIIIIIITTTTTTTLLLLLLLLQQQQQQQQQLLLLLLLLGGGGQQQQQQQQQCCCCCCGGGGNNNNNNNNQQQQQQQQQIIIIIIIIGGGGFFFFFFFFFFFEEEEEEEEEFFFFFFFFFFFWWWWWWWWWWWWWWKKKKKKKKKRRRRRRRRRRRLLLLLLLLCCCCCCLLLLLLLLEEEEEEEEEHHHHHHHHHHGGGGIIIIIIIISSSSSSPPPPPPPDDDDDDDDGGGGVVVVVVVLLLLLLLLEEEEEEEEEDDDDDDDDFFFFFFFFFFFAAAAATTTTTTTDDDDDDDDGGGGQQQQQQQQQDDDDDDDDRRRRRRRRRRRKKKKKKKKKDDDDDDDDVVVVVVVFFFFFFFFFFFFFFFFFFFFFFYYYYYYYYYYYYQQQQQQQQQAAAAADDDDDDDDDDDDDDDDNNNNNNNNHHHHHHHHHHYYYYYYYYYYYYIIIIIIIIPPPPPPPRRRRRRRRRRRAAAAAVVVVVVVLLLLLLLLIIIIIIIIDDDDDDDDLLLLLLLLEEEEEEEEEPPPPPPPRRRRRRRRRRRVVVVVVVIIIIIIIINNNNNNNNNNNNNNNNIIIIIIIIMMMMMMMMTTTTTTTSSSSSSPPPPPPPYYYYYYYYYYYYSSSSSSKKKKKKKKKLLLLLLLLYYYYYYYYYYYYNNNNNNNNQQQQQQQQQEEEEEEEEENNNNNNNNVVVVVVVFFFFFFFFFFFLLLLLLLLSSSSSSKKKKKKKKKHHHHHHHHHHGGGGGGGGGGGGAAAAAGGGGNNNNNNNNNNNNNNNNWWWWWWWWWWWWWWAAAAASSSSSSGGGGFFFFFFFFFFFSSSSSSQQQQQQQQQGGGGEEEEEEEEEKKKKKKKKKVVVVVVVQQQQQQQQQEEEEEEEEEEEEEEEEEEVVVVVVVFFFFFFFFFFFDDDDDDDDIIIIIIIILLLLLLLLDDDDDDDDRRRRRRRRRRREEEEEEEEEAAAAADDDDDDDDGGGGSSSSSSDDDDDDDDSSSSSSLLLLLLLLEEEEEEEEEGGGGFFFFFFFFFFFVVVVVVVLLLLLLLLCCCCCCHHHHHHHHHHSSSSSSIIIIIIIIAAAAAGGGGGGGGTTTTTTTGGGGSSSSSSGGGGMMMMMMMMGGGGSSSSSSYYYYYYYYYYYYVVVVVVVLLLLLLLLEEEEEEEEERRRRRRRRRRRLLLLLLLLSSSSSSEEEEEEEEERRRRRRRRRRRFFFFFFFFFFFPPPPPPPKKKKKKKKKKKKKKKKKKLLLLLLLLIIIIIIIIQQQQQQQQQTTTTTTTYYYYYYYYYYYYSSSSSSVVVVVVVFFFFFFFFFFFPPPPPPPNNNNNNNNQQQQQQQQQDDDDDDDDEEEEEEEEEIIIIIIIISSSSSSDDDDDDDDVVVVVVVVVVVVVVVVVVVVVQQQQQQQQQPPPPPPPYYYYYYYYYYYYNNNNNNNNSSSSSSIIIIIIIILLLLLLLLTTTTTTTLLLLLLLLKKKKKKKKKRRRRRRRRRRRLLLLLLLLTTTTTTTKKKKKKKKKCCCCCCAAAAADDDDDDDDSSSSSSVVVVVVVVVVVVVVVVVVVVVLLLLLLLLDDDDDDDDNNNNNNNNTTTTTTTAAAAALLLLLLLLNNNNNNNNRRRRRRRRRRRIIIIIIIIAAAAATTTTTTTEEEEEEEEERRRRRRRRRRRLLLLLLLLHHHHHHHHHHIIIIIIIIQQQQQQQQQTTTTTTTPPPPPPPTTTTTTTFFFFFFFFFFFTTTTTTTQQQQQQQQQIIIIIIIINNNNNNNNNNNNNNNNLLLLLLLLVVVVVVVSSSSSSTTTTTTTIIIIIIIIMMMMMMMMSSSSSSLLLLLLLLSSSSSSTTTTTTTTTTTTTTTTTTTTTLLLLLLLLRRRRRRRRRRRYYYYYYYYYYYYPPPPPPPSSSSSSYYYYYYYYYYYYMMMMMMMMNNNNNNNNNNNNNNNNNNNNNNNNLLLLLLLLIIIIIIIIGGGGLLLLLLLLTTTTTTTAAAAASSSSSSLLLLLLLLIIIIIIIIPPPPPPPTTTTTTTPPPPPPPQQQQQQQQQLLLLLLLLHHHHHHHHHHFFFFFFFFFFFLLLLLLLLMMMMMMMMTTTTTTTGGGGYYYYYYYYYYYYTTTTTTTPPPPPPPLLLLLLLLMMMMMMMMSSSSSSDDDDDDDDCCCCCCEEEEEEEEEAAAAAKKKKKKKKKTTTTTTTSSSSSSVVVVVVVRRRRRRRRRRRKKKKKKKKKTTTTTTTTTTTTTTVVVVVVVLLLLLLLLDDDDDDDDVVVVVVVMMMMMMMMRRRRRRRRRRRRRRRRRRRRRRLLLLLLLLLLLLLLLLQQQQQQQQQPPPPPPPKKKKKKKKKNNNNNNNNMMMMMMMMMMMMMMMMVVVVVVVSSSSSSAAAAALLLLLLLLTTTTTTTDDDDDDDDKKKKKKKKKQQQQQQQQQSSSSSSRRRRRRRRRRRQQQQQQQQQCCCCCCFFFFFFFFFFFVVVVVVVSSSSSSIIIIIIIILLLLLLLLNNNNNNNNIIIIIIIIIIIIIIIIQQQQQQQQQGGGGEEEEEEEEEVVVVVVVDDDDDDDDPPPPPPPSSSSSSQQQQQQQQQVVVVVVVHHHHHHHHHHKKKKKKKKKSSSSSSLLLLLLLLQQQQQQQQQRRRRRRRRRRRIIIIIIIIRRRRRRRRRRREEEEEEEEERRRRRRRRRRRKKKKKKKKKLLLLLLLLAAAAANNNNNNNNFFFFFFFFFFFIIIIIIIIPPPPPPPWWWWWWWWWWWWWWGGGGPPPPPPPAAAAASSSSSSIIIIIIIIQQQQQQQQQVVVVVVVAAAAALLLLLLLLPPPPPPPRRRRRRRRRRRSSSSSSSSSSSSPPPPPPPYYYYYYYYYYYYVVVVVVVQQQQQQQQQSSSSSSAAAAAHHHHHHHHHHKKKKKKKKKVVVVVVVSSSSSSGGGGLLLLLLLLMMMMMMMMMMMMMMMMAAAAANNNNNNNNHHHHHHHHHHTTTTTTTGGGGIIIIIIIISSSSSSSSSSSSLLLLLLLLFFFFFFFFFFFKKKKKKKKKRRRRRRRRRRRAAAAALLLLLLLLAAAAAQQQQQQQQQYYYYYYYYYYYYDDDDDDDDKKKKKKKKKLLLLLLLLRRRRRRRRRRRKKKKKKKKKRRRRRRRRRRRNNNNNNNNAAAAAFFFFFFFFFFFLLLLLLLLDDDDDDDDNNNNNNNNFFFFFFFFFFFRRRRRRRRRRRRRRRRRRRRRREEEEEEEEESSSSSSMMMMMMMMFFFFFFFFFFFQQQQQQQQQDDDDDDDDDDDDDDDDLLLLLLLLTTTTTTTEEEEEEEEELLLLLLLLDDDDDDDDIIIIIIIIAAAAARRRRRRRRRRRDDDDDDDDTTTTTTTVVVVVVVDDDDDDDDCCCCCCLLLLLLLLVVVVVVVQQQQQQQQQEEEEEEEEEYYYYYYYYYYYYEEEEEEEEEAAAAAAAAAATTTTTTTQQQQQQQQQIIIIIIIIDDDDDDDDYYYYYYYYYYYYPPPPPPPQQQQQQQQQWWWWWWWWWWWWWWSSSSSSPPPPPPPAAAAAVVVVVVVEEEEEEEEEAAAAASSSSSSKKKKKKKKKAAAAAGGGGG

SEQ ID NO: 267 - protein, 3660 aa, Monoeuplotes crassus
MMMMMMMMPPPPPPPRRRRRRRRRRREEEEEEEEEIIIIIIIIIIIIIIIITTTTTTTCCCCCCQQQQQQQQQVVVVVVVGGGGQQQQQQQQQCCCCCCGGGGNNNNNNNNQQQQQQQQQIIIIIIIIGGGGMMMMMMMMEEEEEEEEEFFFFFFFFFFFWWWWWWWWWWWWWWKKKKKKKKKQQQQQQQQQLLLLLLLLCCCCCCMMMMMMMMEEEEEEEEEHHHHHHHHHHGGGGIIIIIIIISSSSSSPPPPPPPEEEEEEEEEGGGGIIIIIIIILLLLLLLLEEEEEEEEEEEEEEEEEEYYYYYYYYYYYYAAAAALLLLLLLLDDDDDDDDGGGGEEEEEEEEEDDDDDDDDRRRRRRRRRRRKKKKKKKKKDDDDDDDDVVVVVVVFFFFFFFFFFFFFFFFFFFFFFYYYYYYYYYYYYQQQQQQQQQAAAAADDDDDDDDDDDDDDDDEEEEEEEEEHHHHHHHHHHYYYYYYYYYYYYVVVVVVVPPPPPPPRRRRRRRRRRRAAAAAVVVVVVVLLLLLLLLIIIIIIIIDDDDDDDDLLLLLLLLEEEEEEEEEPPPPPPPGGGGVVVVVVVIIIIIIIIKKKKKKKKKQQQQQQQQQIIIIIIIIQQQQQQQQQNNNNNNNNSSSSSSPPPPPPPYYYYYYYYYYYYSSSSSSNNNNNNNNLLLLLLLLYYYYYYYYYYYYNNNNNNNNPPPPPPPEEEEEEEEENNNNNNNNFFFFFFFFFFFFFFFFFFFFFFVVVVVVVSSSSSSKKKKKKKKKTTTTTTTMMMMMMMMDDDDDDDDGGGGAAAAAGGGGNNNNNNNNNNNNNNNNWWWWWWWWWWWWWWAAAAAKKKKKKKKKGGGGYYYYYYYYYYYYCCCCCCEEEEEEEEEGGGGAAAAAKKKKKKKKKYYYYYYYYYYYYEEEEEEEEEEEEEEEEEEEEEEEEEEEIIIIIIIIIIIIIIIIEEEEEEEEEMMMMMMMMIIIIIIIIDDDDDDDDRRRRRRRRRRREEEEEEEEEAAAAADDDDDDDDGGGGSSSSSSDDDDDDDDSSSSSSLLLLLLLLEEEEEEEEEGGGGFFFFFFFFFFFVVVVVVVLLLLLLLLTTTTTTTHHHHHHHHHHSSSSSSIIIIIIIIAAAAAGGGGGGGGTTTTTTTGGGGSSSSSSGGGGFFFFFFFFFFFGGGGSSSSSSYYYYYYYYYYYYLLLLLLLLLLLLLLLLEEEEEEEEEKKKKKKKKKLLLLLLLLNNNNNNNNDDDDDDDDHHHHHHHHHHYYYYYYYYYYYYPPPPPPPKKKKKKKKKKKKKKKKKKLLLLLLLLVVVVVVVQQQQQQQQQTTTTTTTYYYYYYYYYYYYSSSSSSVVVVVVVFFFFFFFFFFFPPPPPPPNNNNNNNNDDDDDDDDNNNNNNNNDDDDDDDDIIIIIIIIVVVVVVVVVVVVVVQQQQQQQQQPPPPPPPYYYYYYYYYYYYNNNNNNNNCCCCCCIIIIIIIILLLLLLLLSSSSSSMMMMMMMMKKKKKKKKKRRRRRRRRRRRLLLLLLLLVVVVVVVLLLLLLLLNNNNNNNNAAAAADDDDDDDDCCCCCCVVVVVVVVVVVVVVVVVVVVVLLLLLLLLDDDDDDDDNNNNNNNNTTTTTTTAAAAAIIIIIIIITTTTTTTSSSSSSIIIIIIIIAAAAAVVVVVVVDDDDDDDDRRRRRRRRRRRLLLLLLLLKKKKKKKKKLLLLLLLLLLLLLLLLHHHHHHHHHHPPPPPPPTTTTTTTIIIIIIIISSSSSSQQQQQQQQQVVVVVVVNNNNNNNNSSSSSSIIIIIIIIVVVVVVVSSSSSSTTTTTTTVVVVVVVMMMMMMMMAAAAAAAAAASSSSSSTTTTTTTTTTTTTTTTTTTTTLLLLLLLLRRRRRRRRRRRYYYYYYYYYYYYPPPPPPPGGGGYYYYYYYYYYYYMMMMMMMMNNNNNNNNNNNNNNNNDDDDDDDDLLLLLLLLVVVVVVVGGGGLLLLLLLLIIIIIIIIAAAAASSSSSSLLLLLLLLVVVVVVVPPPPPPPTTTTTTTPPPPPPPRRRRRRRRRRRCCCCCCHHHHHHHHHHFFFFFFFFFFFLLLLLLLLMMMMMMMMTTTTTTTGGGGYYYYYYYYYYYYTTTTTTTPPPPPPPLLLLLLLLSSSSSSLLLLLLLLNNNNNNNNDDDDDDDDQQQQQQQQQKKKKKKKKKVVVVVVVSSSSSSSSSSSSIIIIIIIIRRRRRRRRRRRKKKKKKKKKTTTTTTTTTTTTTTVVVVVVVLLLLLLLLDDDDDDDDVVVVVVVMMMMMMMMRRRRRRRRRRRRRRRRRRRRRRLLLLLLLLLLLLLLLLQQQQQQQQQTTTTTTTRRRRRRRRRRRNNNNNNNNIIIIIIIIMMMMMMMMTTTTTTTSSSSSSGGGGAAAAAIIIIIIIIKKKKKKKKKKKKKKKKKKGGGGAAAAAYYYYYYYYYYYYMMMMMMMMSSSSSSIIIIIIIILLLLLLLLNNNNNNNNIIIIIIIIIIIIIIIIQQQQQQQQQGGGGDDDDDDDDVVVVVVVDDDDDDDDPPPPPPPTTTTTTTQQQQQQQQQVVVVVVVHHHHHHHHHHKKKKKKKKKSSSSSSLLLLLLLLQQQQQQQQQRRRRRRRRRRRIIIIIIIIRRRRRRRRRRREEEEEEEEERRRRRRRRRRRNNNNNNNNVVVVVVVAAAAANNNNNNNNFFFFFFFFFFFIIIIIIIIPPPPPPPWWWWWWWWWWWWWWGGGGPPPPPPPAAAAASSSSSSIIIIIIIIQQQQQQQQQVVVVVVVAAAAALLLLLLLLSSSSSSKKKKKKKKKKKKKKKKKKSSSSSSPPPPPPPYYYYYYYYYYYYIIIIIIIIEEEEEEEEESSSSSSDDDDDDDDNNNNNNNNKKKKKKKKKVVVVVVVSSSSSSGGGGLLLLLLLLMMMMMMMMLLLLLLLLAAAAANNNNNNNNHHHHHHHHHHTTTTTTTGGGGIIIIIIIIRRRRRRRRRRRSSSSSSIIIIIIIIFFFFFFFFFFFQQQQQQQQQVVVVVVVLLLLLLLLYYYYYYYYYYYYGGGGQQQQQQQQQYYYYYYYYYYYYRRRRRRRRRRRQQQQQQQQQFFFFFFFFFFFRRRRRRRRRRRKKKKKKKKKRRRRRRRRRRRDDDDDDDDAAAAAFFFFFFFFFFFLLLLLLLLGGGGTTTTTTTYYYYYYYYYYYYRRRRRRRRRRREEEEEEEEETTTTTTTKKKKKKKKKIIIIIIIIFFFFFFFFFFFQQQQQQQQQDDDDDDDDNNNNNNNNLLLLLLLLDDDDDDDDEEEEEEEEEFFFFFFFFFFFDDDDDDDDSSSSSSSSSSSSEEEEEEEEEEEEEEEEEEVVVVVVVVVVVVVVKKKKKKKKKDDDDDDDDLLLLLLLLIIIIIIIIDDDDDDDDEEEEEEEEEYYYYYYYYYYYYAAAAAAAAAAAAAAAEEEEEEEEEKKKKKKKKKMMMMMMMMDDDDDDDDYYYYYYYYYYYYIIIIIIIINNNNNNNNRRRRRRRRRRRGGGGKKKKKKKKKDDDDDDDDDDDDDDDDEEEEEEEEEDDDDDDDDMMMMMMMMDDDDDDDDYYYYYYYYYYYYDDDDDDDDPPPPPPPRRRRRRRRRRRAAAAAPPPPPPPPPPPPPPNNNNNNNNFFFFFFFFFFFRRRRRRRRRRRPPPPPPPIIIIIIIIEEEEEEEEEE

SEQ ID NO: 268 - protein, 3651 aa, Euplotes octocarinatus
MMMMMMMMPPPPPPPRRRRRRRRRRREEEEEEEEEIIIIIIIIIIIIIIIITTTTTTTCCCCCCQQQQQQQQQVVVVVVVGGGGQQQQQQQQQCCCCCCGGGGNNNNNNNNQQQQQQQQQIIIIIIIIGGGGMMMMMMMMEEEEEEEEEFFFFFFFFFFFWWWWWWWWWWWWWWKKKKKKKKKQQQQQQQQQLLLLLLLLCCCCCCMMMMMMMMEEEEEEEEEHHHHHHHHHHGGGGIIIIIIIINNNNNNNNPPPPPPPEEEEEEEEEGGGGIIIIIIIILLLLLLLLEEEEEEEEEDDDDDDDDFFFFFFFFFFFAAAAAVVVVVVVNNNNNNNNGGGGEEEEEEEEEDDDDDDDDRRRRRRRRRRRKKKKKKKKKDDDDDDDDVVVVVVVFFFFFFFFFFFFFFFFFFFFFFYYYYYYYYYYYYQQQQQQQQQAAAAADDDDDDDDDDDDDDDDEEEEEEEEEHHHHHHHHHHYYYYYYYYYYYYVVVVVVVPPPPPPPRRRRRRRRRRRAAAAAVVVVVVVLLLLLLLLIIIIIIIIDDDDDDDDLLLLLLLLEEEEEEEEEPPPPPPPRRRRRRRRRRRVVVVVVVIIIIIIIINNNNNNNNGGGGIIIIIIIIQQQQQQQQQKKKKKKKKKSSSSSSAAAAAYYYYYYYYYYYYSSSSSSSSSSSSLLLLLLLLYYYYYYYYYYYYNNNNNNNNPPPPPPPEEEEEEEEENNNNNNNNIIIIIIIIYYYYYYYYYYYYIIIIIIIIAAAAAKKKKKKKKKHHHHHHHHHHGGGGGGGGGGGGAAAAAGGGGNNNNNNNNNNNNNNNNWWWWWWWWWWWWWWGGGGRRRRRRRRRRRGGGGYYYYYYYYYYYYTTTTTTTDDDDDDDDAAAAAEEEEEEEEEKKKKKKKKKVVVVVVVQQQQQQQQQDDDDDDDDEEEEEEEEEIIIIIIIILLLLLLLLEEEEEEEEEMMMMMMMMIIIIIIIIDDDDDDDDRRRRRRRRRRREEEEEEEEEAAAAADDDDDDDDGGGGSSSSSSDDDDDDDDSSSSSSLLLLLLLLEEEEEEEEEGGGGFFFFFFFFFFFVVVVVVVLLLLLLLLTTTTTTTHHHHHHHHHHSSSSSSIIIIIIIIAAAAAGGGGGGGGTTTTTTTGGGGSSSSSSGGGGFFFFFFFFFFFGGGGSSSSSSYYYYYYYYYYYYLLLLLLLLLLLLLLLLEEEEEEEEERRRRRRRRRRRLLLLLLLLNNNNNNNNDDDDDDDDHHHHHHHHHHYYYYYYYYYYYYPPPPPPPKKKKKKKKKKKKKKKKKKLLLLLLLLIIIIIIIIQQQQQQQQQTTTTTTTYYYYYYYYYYYYSSSSSSVVVVVVVFFFFFFFFFFFPPPPPPPIIIIIIIIEEEEEEEEENNNNNNNNDDDDDDDDVVVVVVVVVVVVVVVVVVVVVQQQQQQQQQPPPPPPPYYYYYYYYYYYYNNNNNNNNCCCCCCLLLLLLLLLLLLLLLLSSSSSSIIIIIIIIKKKKKKKKKRRRRRRRRRRRLLLLLLLLTTTTTTTLLLLLLLLNNNNNNNNAAAAADDDDDDDDCCCCCCVVVVVVVVVVVVVVVVVVVVVLLLLLLLLDDDDDDDDNNNNNNNNNNNNNNNNAAAAALLLLLLLLTTTTTTTSSSSSSIIIIIIIIAAAAAVVVVVVVDDDDDDDDRRRRRRRRRRRLLLLLLLLKKKKKKKKKIIIIIIIILLLLLLLLQQQQQQQQQPPPPPPPTTTTTTTFFFFFFFFFFFSSSSSSQQQQQQQQQIIIIIIIINNNNNNNNSSSSSSIIIIIIIIVVVVVVVSSSSSSTTTTTTTVVVVVVVMMMMMMMMAAAAAAAAAASSSSSSTTTTTTTTTTTTTTTTTTTTTLLLLLLLLRRRRRRRRRRRYYYYYYYYYYYYPPPPPPPGGGGYYYYYYYYYYYYMMMMMMMMNNNNNNNNNNNNNNNNDDDDDDDDMMMMMMMMVVVVVVVGGGGLLLLLLLLIIIIIIIIAAAAASSSSSSLLLLLLLLVVVVVVVPPPPPPPTTTTTTTPPPPPPPRRRRRRRRRRRCCCCCCHHHHHHHHHHFFFFFFFFFFFLLLLLLLLMMMMMMMMTTTTTTTGGGGYYYYYYYYYYYYTTTTTTTPPPPPPPLLLLLLLLSSSSSSLLLLLLLLDDDDDDDDQQQQQQQQQKKKKKKKKKFFFFFFFFFFFTTTTTTTSSSSSSVVVVVVVRRRRRRRRRRRKKKKKKKKKTTTTTTTTTTTTTTVVVVVVVLLLLLLLLDDDDDDDDVVVVVVVMMMMMMMMRRRRRRRRRRRRRRRRRRRRRRLLLLLLLLLLLLLLLLQQQQQQQQQTTTTTTTKKKKKKKKKNNNNNNNNIIIIIIIIMMMMMMMMVVVVVVVTTTTTTTGGGGAAAAAVVVVVVVKKKKKKKKKKKKKKKKKKGGGGAAAAAYYYYYYYYYYYYMMMMMMMMSSSSSSIIIIIIIILLLLLLLLNNNNNNNNVVVVVVVIIIIIIIIQQQQQQQQQGGGGDDDDDDDDVVVVVVVDDDDDDDDPPPPPPPTTTTTTTQQQQQQQQQVVVVVVVHHHHHHHHHHKKKKKKKKKSSSSSSLLLLLLLLQQQQQQQQQRRRRRRRRRRRIIIIIIIIRRRRRRRRRRREEEEEEEEERRRRRRRRRRRKKKKKKKKKLLLLLLLLAAAAANNNNNNNNFFFFFFFFFFFIIIIIIIIPPPPPPPWWWWWWWWWWWWWWGGGGPPPPPPPAAAAASSSSSSIIIIIIIIQQQQQQQQQVVVVVVVAAAAALLLLLLLLSSSSSSKKKKKKKKKKKKKKKKKKSSSSSSPPPPPPPYYYYYYYYYYYYIIIIIIIIDDDDDDDDSSSSSSGGGGHHHHHHHHHHKKKKKKKKKVVVVVVVSSSSSSGGGGLLLLLLLLMMMMMMMMLLLLLLLLAAAAANNNNNNNNHHHHHHHHHHTTTTTTTGGGGIIIIIIIIRRRRRRRRRRRSSSSSSIIIIIIIIFFFFFFFFFFFKKKKKKKKKVVVVVVVLLLLLLLLYYYYYYYYYYYYDDDDDDDDQQQQQQQQQYYYYYYYYYYYYRRRRRRRRRRRTTTTTTTFFFFFFFFFFFRRRRRRRRRRRKKKKKKKKKRRRRRRRRRRRDDDDDDDDAAAAAYYYYYYYYYYYYMMMMMMMMNNNNNNNNIIIIIIIIFFFFFFFFFFFKKKKKKKKKQQQQQQQQQTTTTTTTKKKKKKKKKIIIIIIIIFFFFFFFFFFFEEEEEEEEEDDDDDDDDNNNNNNNNLLLLLLLLDDDDDDDDEEEEEEEEEFFFFFFFFFFFDDDDDDDDSSSSSSSSSSSSDDDDDDDDEEEEEEEEEVVVVVVVVVVVVVVKKKKKKKKKSSSSSSLLLLLLLLIIIIIIIIDDDDDDDDEEEEEEEEEYYYYYYYYYYYYAAAAAAAAAAAAAAAEEEEEEEEEKKKKKKKKKMMMMMMMMDDDDDDDDYYYYYYYYYYYYIIIIIIIINNNNNNNNWWWWWWWWWWWWWWGGGGSSSSSSDDDDDDDDDDDDDDDDDDDDDDDDDDDDDDDDMMMMMMMMQQQQQQQQQFFFFFFFFFFFDDDDDDDDPPPPPPPRRRRRRRRRRREEEEEEEEEPPPPPPPPPPPPPPKKKKKKKKKFFFFFFFFFFFSSSSSSNNNNNNNNIIIIIIIIQQQQQQQQQQ

SEQ ID NO: 269 - protein, 3595 aa, Homo sapiens
MMMMMMMMPPPPPPPRRRRRRRRRRREEEEEEEEEIIIIIIIIIIIIIIIITTTTTTTLLLLLLLLQQQQQQQQQLLLLLLLLGGGGQQQQQQQQQCCCCCCGGGGNNNNNNNNQQQQQQQQQIIIIIIIIGGGGFFFFFFFFFFFEEEEEEEEEFFFFFFFFFFFWWWWWWWWWWWWWWKKKKKKKKKQQQQQQQQQLLLLLLLLCCCCCCAAAAAEEEEEEEEEHHHHHHHHHHGGGGIIIIIIIISSSSSSPPPPPPPEEEEEEEEEGGGGIIIIIIIIVVVVVVVEEEEEEEEEEEEEEEEEEFFFFFFFFFFFAAAAATTTTTTTEEEEEEEEEGGGGTTTTTTTDDDDDDDDRRRRRRRRRRRKKKKKKKKKDDDDDDDDVVVVVVVFFFFFFFFFFFFFFFFFFFFFFYYYYYYYYYYYYQQQQQQQQQAAAAADDDDDDDDDDDDDDDDEEEEEEEEEHHHHHHHHHHYYYYYYYYYYYYIIIIIIIIPPPPPPPRRRRRRRRRRRAAAAAVVVVVVVLLLLLLLLLLLLLLLLDDDDDDDDLLLLLLLLEEEEEEEEEPPPPPPPRRRRRRRRRRRVVVVVVVIIIIIIIIHHHHHHHHHHSSSSSSIIIIIIIILLLLLLLLNNNNNNNNSSSSSSPPPPPPPYYYYYYYYYYYYAAAAAKKKKKKKKKLLLLLLLLYYYYYYYYYYYYNNNNNNNNPPPPPPPEEEEEEEEENNNNNNNNIIIIIIIIYYYYYYYYYYYYLLLLLLLLSSSSSSEEEEEEEEEHHHHHHHHHHGGGGGGGGGGGGAAAAAGGGGNNNNNNNNNNNNNNNNWWWWWWWWWWWWWWAAAAASSSSSSGGGGFFFFFFFFFFFSSSSSSQQQQQQQQQGGGGEEEEEEEEEKKKKKKKKKIIIIIIIIHHHHHHHHHHEEEEEEEEEDDDDDDDDIIIIIIIIFFFFFFFFFFFDDDDDDDDIIIIIIIIIIIIIIIIDDDDDDDDRRRRRRRRRRREEEEEEEEEAAAAADDDDDDDDGGGGSSSSSSDDDDDDDDSSSSSSLLLLLLLLEEEEEEEEEGGGGFFFFFFFFFFFVVVVVVVLLLLLLLLCCCCCCHHHHHHHHHHSSSSSSIIIIIIIIAAAAAGGGGGGGGTTTTTTTGGGGSSSSSSGGGGLLLLLLLLGGGGSSSSSSYYYYYYYYYYYYLLLLLLLLLLLLLLLLEEEEEEEEERRRRRRRRRRRLLLLLLLLNNNNNNNNDDDDDDDDRRRRRRRRRRRYYYYYYYYYYYYPPPPPPPKKKKKKKKKKKKKKKKKKLLLLLLLLVVVVVVVQQQQQQQQQTTTTTTTYYYYYYYYYYYYSSSSSSVVVVVVVFFFFFFFFFFFPPPPPPPYYYYYYYYYYYYQQQQQQQQQDDDDDDDDEEEEEEEEEMMMMMMMMSSSSSSDDDDDDDDVVVVVVVVVVVVVVVVVVVVVQQQQQQQQQPPPPPPPYYYYYYYYYYYYNNNNNNNNSSSSSSLLLLLLLLLLLLLLLLTTTTTTTLLLLLLLLKKKKKKKKKRRRRRRRRRRRLLLLLLLLTTTTTTTQQQQQQQQQNNNNNNNNAAAAADDDDDDDDCCCCCCVVVVVVVVVVVVVVVVVVVVVLLLLLLLLDDDDDDDDNNNNNNNNTTTTTTTAAAAALLLLLLLLNNNNNNNNRRRRRRRRRRRIIIIIIIIAAAAATTTTTTTDDDDDDDDRRRRRRRRRRRLLLLLLLLHHHHHHHHHHIIIIIIIIQQQQQQQQQNNNNNNNNPPPPPPPSSSSSSFFFFFFFFFFFSSSSSSQQQQQQQQQIIIIIIIINNNNNNNNQQQQQQQQQLLLLLLLLVVVVVVVSSSSSSTTTTTTTIIIIIIIIMMMMMMMMSSSSSSAAAAASSSSSSTTTTTTTTTTTTTTTTTTTTTLLLLLLLLRRRRRRRRRRRYYYYYYYYYYYYPPPPPPPGGGGYYYYYYYYYYYYMMMMMMMMNNNNNNNNNNNNNNNNDDDDDDDDLLLLLLLLIIIIIIIIGGGGLLLLLLLLIIIIIIIIAAAAASSSSSSLLLLLLLLIIIIIIIIPPPPPPPTTTTTTTPPPPPPPRRRRRRRRRRRLLLLLLLLHHHHHHHHHHFFFFFFFFFFFLLLLLLLLMMMMMMMMTTTTTTTGGGGYYYYYYYYYYYYTTTTTTTPPPPPPPLLLLLLLLTTTTTTTTTTTTTTDDDDDDDDQQQQQQQQQSSSSSSVVVVVVVAAAAASSSSSSVVVVVVVRRRRRRRRRRRKKKKKKKKKTTTTTTTTTTTTTTVVVVVVVLLLLLLLLDDDDDDDDVVVVVVVMMMMMMMMRRRRRRRRRRRRRRRRRRRRRRLLLLLLLLLLLLLLLLQQQQQQQQQPPPPPPPKKKKKKKKKNNNNNNNNVVVVVVVMMMMMMMMVVVVVVVSSSSSSTTTTTTTGGGGRRRRRRRRRRRDDDDDDDDRRRRRRRRRRRQQQQQQQQQTTTTTTTNNNNNNNNHHHHHHHHHHCCCCCCYYYYYYYYYYYYIIIIIIIIAAAAAIIIIIIIILLLLLLLLNNNNNNNNIIIIIIIIIIIIIIIIQQQQQQQQQGGGGEEEEEEEEEVVVVVVVDDDDDDDDPPPPPPPTTTTTTTQQQQQQQQQVVVVVVVHHHHHHHHHHKKKKKKKKKSSSSSSLLLLLLLLQQQQQQQQQRRRRRRRRRRRIIIIIIIIRRRRRRRRRRREEEEEEEEERRRRRRRRRRRKKKKKKKKKLLLLLLLLAAAAANNNNNNNNFFFFFFFFFFFIIIIIIIIPPPPPPPWWWWWWWWWWWWWWGGGGPPPPPPPAAAAASSSSSSIIIIIIIIQQQQQQQQQVVVVVVVAAAAALLLLLLLLSSSSSSRRRRRRRRRRRKKKKKKKKKSSSSSSPPPPPPPYYYYYYYYYYYYLLLLLLLLPPPPPPPSSSSSSAAAAAHHHHHHHHHHRRRRRRRRRRRVVVVVVVSSSSSSGGGGLLLLLLLLMMMMMMMMMMMMMMMMAAAAANNNNNNNNHHHHHHHHHHTTTTTTTSSSSSSIIIIIIIISSSSSSSSSSSSLLLLLLLLFFFFFFFFFFFEEEEEEEEESSSSSSSSSSSSCCCCCCQQQQQQQQQQQQQQQQQQFFFFFFFFFFFDDDDDDDDKKKKKKKKKLLLLLLLLRRRRRRRRRRRKKKKKKKKKRRRRRRRRRRRDDDDDDDDAAAAAFFFFFFFFFFFLLLLLLLLEEEEEEEEEQQQQQQQQQFFFFFFFFFFFRRRRRRRRRRRKKKKKKKKKEEEEEEEEEDDDDDDDDMMMMMMMMFFFFFFFFFFFKKKKKKKKKDDDDDDDDNNNNNNNNFFFFFFFFFFFDDDDDDDDEEEEEEEEEMMMMMMMMDDDDDDDDRRRRRRRRRRRSSSSSSRRRRRRRRRRREEEEEEEEEVVVVVVVVVVVVVVQQQQQQQQQEEEEEEEEELLLLLLLLIIIIIIIIDDDDDDDDEEEEEEEEEYYYYYYYYYYYYHHHHHHHHHHAAAAAAAAAATTTTTTTQQQQQQQQQPPPPPPPDDDDDDDDYYYYYYYYYYYYIIIIIIIISSSSSSWWWWWWWWWWWWWWGGGGTTTTTTTQQQQQQQQQEEEEEEEEEQQQQQQQQQQ

SEQ ID NO: 270 - protein, 3710 aa, Zea mays
MMMMMMMMPPPPPPPRRRRRRRRRRREEEEEEEEEIIIIIIIIIIIIIIIITTTTTTTIIIIIIIIQQQQQQQQQVVVVVVVGGGGQQQQQQQQQCCCCCCGGGGNNNNNNNNQQQQQQQQQIIIIIIIIGGGGMMMMMMMMEEEEEEEEEFFFFFFFFFFFWWWWWWWWWWWWWWKKKKKKKKKQQQQQQQQQLLLLLLLLCCCCCCLLLLLLLLEEEEEEEEEHHHHHHHHHHGGGGIIIIIIIIGGGGKKKKKKKKKDDDDDDDDGGGGLLLLLLLLLLLLLLLLEEEEEEEEEDDDDDDDDFFFFFFFFFFFAAAAATTTTTTTQQQQQQQQQGGGGGGGGDDDDDDDDRRRRRRRRRRRKKKKKKKKKDDDDDDDDVVVVVVVFFFFFFFFFFFFFFFFFFFFFFYYYYYYYYYYYYQQQQQQQQQAAAAADDDDDDDDDDDDDDDDQQQQQQQQQHHHHHHHHHHFFFFFFFFFFFIIIIIIIIPPPPPPPRRRRRRRRRRRSSSSSSLLLLLLLLLLLLLLLLIIIIIIIIDDDDDDDDLLLLLLLLEEEEEEEEEPPPPPPPRRRRRRRRRRRVVVVVVVIIIIIIIINNNNNNNNGGGGIIIIIIIIQQQQQQQQQNNNNNNNNSSSSSSEEEEEEEEEYYYYYYYYYYYYRRRRRRRRRRRNNNNNNNNLLLLLLLLYYYYYYYYYYYYNNNNNNNNHHHHHHHHHHEEEEEEEEENNNNNNNNIIIIIIIIFFFFFFFFFFFVVVVVVVAAAAAEEEEEEEEEHHHHHHHHHHGGGGGGGGGGGGAAAAAGGGGNNNNNNNNNNNNNNNNWWWWWWWWWWWWWWAAAAASSSSSSGGGGYYYYYYYYYYYYHHHHHHHHHHQQQQQQQQQGGGGEEEEEEEEEQQQQQQQQQVVVVVVVVVVVVVVDDDDDDDDDDDDDDDDIIIIIIIIMMMMMMMMDDDDDDDDMMMMMMMMVVVVVVVDDDDDDDDRRRRRRRRRRREEEEEEEEEAAAAADDDDDDDDGGGGSSSSSSDDDDDDDDSSSSSSLLLLLLLLEEEEEEEEEGGGGFFFFFFFFFFFVVVVVVVLLLLLLLLCCCCCCHHHHHHHHHHSSSSSSIIIIIIIIAAAAAGGGGGGGGTTTTTTTGGGGSSSSSSGGGGMMMMMMMMGGGGSSSSSSYYYYYYYYYYYYLLLLLLLLLLLLLLLLEEEEEEEEETTTTTTTLLLLLLLLNNNNNNNNDDDDDDDDRRRRRRRRRRRYYYYYYYYYYYYSSSSSSKKKKKKKKKKKKKKKKKKLLLLLLLLVVVVVVVQQQQQQQQQTTTTTTTYYYYYYYYYYYYSSSSSSVVVVVVVFFFFFFFFFFFPPPPPPPNNNNNNNNQQQQQQQQQMMMMMMMMEEEEEEEEETTTTTTTSSSSSSDDDDDDDDVVVVVVVVVVVVVVVVVVVVVQQQQQQQQQPPPPPPPYYYYYYYYYYYYNNNNNNNNSSSSSSLLLLLLLLLLLLLLLLTTTTTTTLLLLLLLLKKKKKKKKKRRRRRRRRRRRLLLLLLLLTTTTTTTLLLLLLLLNNNNNNNNAAAAADDDDDDDDCCCCCCVVVVVVVVVVVVVVVVVVVVVLLLLLLLLDDDDDDDDNNNNNNNNTTTTTTTAAAAALLLLLLLLNNNNNNNNRRRRRRRRRRRIIIIIIIIAAAAAVVVVVVVEEEEEEEEERRRRRRRRRRRLLLLLLLLHHHHHHHHHHLLLLLLLLSSSSSSNNNNNNNNPPPPPPPTTTTTTTFFFFFFFFFFFAAAAAQQQQQQQQQTTTTTTTNNNNNNNNSSSSSSLLLLLLLLVVVVVVVSSSSSSTTTTTTTVVVVVVVMMMMMMMMSSSSSSAAAAASSSSSSTTTTTTTTTTTTTTTTTTTTTLLLLLLLLRRRRRRRRRRRYYYYYYYYYYYYPPPPPPPGGGGYYYYYYYYYYYYMMMMMMMMNNNNNNNNNNNNNNNNDDDDDDDDLLLLLLLLVVVVVVVGGGGLLLLLLLLLLLLLLLLAAAAASSSSSSLLLLLLLLIIIIIIIIPPPPPPPTTTTTTTPPPPPPPRRRRRRRRRRRCCCCCCHHHHHHHHHHFFFFFFFFFFFLLLLLLLLMMMMMMMMTTTTTTTGGGGYYYYYYYYYYYYTTTTTTTPPPPPPPLLLLLLLLTTTTTTTVVVVVVVEEEEEEEEERRRRRRRRRRRQQQQQQQQQVVVVVVVNNNNNNNNMMMMMMMMIIIIIIIIRRRRRRRRRRRKKKKKKKKKTTTTTTTTTTTTTTVVVVVVVLLLLLLLLDDDDDDDDVVVVVVVMMMMMMMMRRRRRRRRRRRRRRRRRRRRRRLLLLLLLLLLLLLLLLQQQQQQQQQTTTTTTTKKKKKKKKKNNNNNNNNVVVVVVVMMMMMMMMVVVVVVVSSSSSSSSSSSSYYYYYYYYYYYYAAAAARRRRRRRRRRRTTTTTTTKKKKKKKKKEEEEEEEEEAAAAASSSSSSQQQQQQQQQAAAAAKKKKKKKKKYYYYYYYYYYYYIIIIIIIISSSSSSIIIIIIIILLLLLLLLNNNNNNNNIIIIIIIIIIIIIIIIQQQQQQQQQGGGGEEEEEEEEEVVVVVVVDDDDDDDDPPPPPPPTTTTTTTQQQQQQQQQVVVVVVVHHHHHHHHHHEEEEEEEEESSSSSSLLLLLLLLQQQQQQQQQRRRRRRRRRRRIIIIIIIIRRRRRRRRRRREEEEEEEEERRRRRRRRRRRKKKKKKKKKLLLLLLLLVVVVVVVNNNNNNNNFFFFFFFFFFFIIIIIIIIDDDDDDDDWWWWWWWWWWWWWWAAAAAPPPPPPPAAAAASSSSSSIIIIIIIIQQQQQQQQQVVVVVVVAAAAALLLLLLLLSSSSSSRRRRRRRRRRRKKKKKKKKKSSSSSSPPPPPPPYYYYYYYYYYYYVVVVVVVQQQQQQQQQTTTTTTTTTTTTTTHHHHHHHHHHRRRRRRRRRRRVVVVVVVSSSSSSGGGGLLLLLLLLMMMMMMMMLLLLLLLLAAAAANNNNNNNNHHHHHHHHHHTTTTTTTSSSSSSIIIIIIIIRRRRRRRRRRRHHHHHHHHHHLLLLLLLLFFFFFFFFFFFGGGGKKKKKKKKKCCCCCCLLLLLLLLGGGGQQQQQQQQQYYYYYYYYYYYYEEEEEEEEEKKKKKKKKKLLLLLLLLRRRRRRRRRRRKKKKKKKKKKKKKKKKKKQQQQQQQQQAAAAAFFFFFFFFFFFLLLLLLLLDDDDDDDDNNNNNNNNYYYYYYYYYYYYRRRRRRRRRRRKKKKKKKKKFFFFFFFFFFFPPPPPPPMMMMMMMMFFFFFFFFFFFAAAAADDDDDDDDNNNNNNNNDDDDDDDDLLLLLLLLSSSSSSEEEEEEEEEFFFFFFFFFFFDDDDDDDDEEEEEEEEESSSSSSRRRRRRRRRRREEEEEEEEEIIIIIIIIIIIIIIIIEEEEEEEEESSSSSSLLLLLLLLVVVVVVVDDDDDDDDEEEEEEEEEYYYYYYYYYYYYKKKKKKKKKAAAAACCCCCCEEEEEEEEESSSSSSPPPPPPPDDDDDDDDYYYYYYYYYYYYIIIIIIIIKKKKKKKKKWWWWWWWWWWWWWWGGGGMMMMMMMMEEEEEEEEEDDDDDDDDPPPPPPPGGGGEEEEEEEEEAAAAANNNNNNNNVVVVVVVAAAAAAAAAADDDDDDDDLLLLLLLLDDDDDDDDSSSSSSKKKKKKKKKLLLLLLLLVVVVVVVVVVVVVVV

SEQ ID NO: 271 - protein, 3599 aa, Mus musculus
MMMMMMMMPPPPPPPRRRRRRRRRRREEEEEEEEEIIIIIIIIIIIIIIIITTTTTTTLLLLLLLLQQQQQQQQQLLLLLLLLGGGGQQQQQQQQQCCCCCCGGGGNNNNNNNNQQQQQQQQQIIIIIIIIGGGGFFFFFFFFFFFEEEEEEEEEFFFFFFFFFFFWWWWWWWWWWWWWWKKKKKKKKKQQQQQQQQQLLLLLLLLCCCCCCAAAAAEEEEEEEEEHHHHHHHHHHGGGGIIIIIIIISSSSSSPPPPPPPEEEEEEEEEGGGGIIIIIIIIVVVVVVVEEEEEEEEEEEEEEEEEEFFFFFFFFFFFAAAAATTTTTTTEEEEEEEEEGGGGTTTTTTTDDDDDDDDRRRRRRRRRRRKKKKKKKKKDDDDDDDDVVVVVVVFFFFFFFFFFFFFFFFFFFFFFYYYYYYYYYYYYQQQQQQQQQAAAAADDDDDDDDDDDDDDDDEEEEEEEEEHHHHHHHHHHYYYYYYYYYYYYIIIIIIIIPPPPPPPRRRRRRRRRRRAAAAAVVVVVVVLLLLLLLLLLLLLLLLDDDDDDDDLLLLLLLLEEEEEEEEEPPPPPPPRRRRRRRRRRRVVVVVVVIIIIIIIIHHHHHHHHHHSSSSSSIIIIIIIILLLLLLLLNNNNNNNNSSSSSSSSSSSSYYYYYYYYYYYYAAAAAKKKKKKKKKLLLLLLLLYYYYYYYYYYYYNNNNNNNNPPPPPPPEEEEEEEEENNNNNNNNIIIIIIIIYYYYYYYYYYYYLLLLLLLLSSSSSSEEEEEEEEEHHHHHHHHHHGGGGGGGGGGGGAAAAAGGGGNNNNNNNNNNNNNNNNWWWWWWWWWWWWWWGGGGRRRRRRRRRRRGGGGFFFFFFFFFFFSSSSSSQQQQQQQQQGGGGEEEEEEEEEKKKKKKKKKIIIIIIIIHHHHHHHHHHEEEEEEEEEDDDDDDDDIIIIIIIIFFFFFFFFFFFDDDDDDDDIIIIIIIIIIIIIIIIDDDDDDDDRRRRRRRRRRREEEEEEEEEAAAAADDDDDDDDGGGGSSSSSSDDDDDDDDSSSSSSLLLLLLLLEEEEEEEEEGGGGFFFFFFFFFFFVVVVVVVLLLLLLLLCCCCCCHHHHHHHHHHSSSSSSIIIIIIIIAAAAAGGGGGGGGTTTTTTTGGGGSSSSSSGGGGLLLLLLLLGGGGSSSSSSYYYYYYYYYYYYLLLLLLLLLLLLLLLLEEEEEEEEERRRRRRRRRRRLLLLLLLLNNNNNNNNDDDDDDDDRRRRRRRRRRRYYYYYYYYYYYYPPPPPPPKKKKKKKKKKKKKKKKKKLLLLLLLLVVVVVVVQQQQQQQQQTTTTTTTYYYYYYYYYYYYSSSSSSVVVVVVVFFFFFFFFFFFPPPPPPPNNNNNNNNQQQQQQQQQDDDDDDDDEEEEEEEEEMMMMMMMMSSSSSSDDDDDDDDVVVVVVVVVVVVVVVVVVVVVQQQQQQQQQPPPPPPPYYYYYYYYYYYYNNNNNNNNSSSSSSLLLLLLLLLLLLLLLLTTTTTTTLLLLLLLLKKKKKKKKKRRRRRRRRRRRLLLLLLLLTTTTTTTQQQQQQQQQNNNNNNNNAAAAADDDDDDDDCCCCCCVVVVVVVVVVVVVVVVVVVVVLLLLLLLLDDDDDDDDNNNNNNNNTTTTTTTAAAAALLLLLLLLNNNNNNNNRRRRRRRRRRRIIIIIIIIAAAAATTTTTTTDDDDDDDDRRRRRRRRRRRLLLLLLLLHHHHHHHHHHIIIIIIIIQQQQQQQQQNNNNNNNNPPPPPPPSSSSSSFFFFFFFFFFFSSSSSSQQQQQQQQQIIIIIIIINNNNNNNNQQQQQQQQQLLLLLLLLVVVVVVVSSSSSSTTTTTTTIIIIIIIIMMMMMMMMSSSSSSAAAAASSSSSSTTTTTTTTTTTTTTTTTTTTTLLLLLLLLRRRRRRRRRRRYYYYYYYYYYYYPPPPPPPGGGGYYYYYYYYYYYYMMMMMMMMNNNNNNNNNNNNNNNNDDDDDDDDLLLLLLLLIIIIIIIIGGGGLLLLLLLLIIIIIIIIAAAAASSSSSSLLLLLLLLIIIIIIIIPPPPPPPTTTTTTTPPPPPPPRRRRRRRRRRRLLLLLLLLHHHHHHHHHHFFFFFFFFFFFLLLLLLLLMMMMMMMMTTTTTTTGGGGYYYYYYYYYYYYTTTTTTTPPPPPPPLLLLLLLLTTTTTTTTTTTTTTDDDDDDDDQQQQQQQQQSSSSSSVVVVVVVAAAAASSSSSSVVVVVVVRRRRRRRRRRRKKKKKKKKKTTTTTTTTTTTTTTVVVVVVVLLLLLLLLDDDDDDDDVVVVVVVMMMMMMMMRRRRRRRRRRRRRRRRRRRRRRLLLLLLLLLLLLLLLLQQQQQQQQQPPPPPPPKKKKKKKKKNNNNNNNNVVVVVVVMMMMMMMMVVVVVVVSSSSSSTTTTTTTGGGGRRRRRRRRRRRDDDDDDDDRRRRRRRRRRRQQQQQQQQQTTTTTTTNNNNNNNNHHHHHHHHHHCCCCCCYYYYYYYYYYYYIIIIIIIIAAAAAIIIIIIIILLLLLLLLNNNNNNNNIIIIIIIIIIIIIIIIQQQQQQQQQGGGGEEEEEEEEEVVVVVVVDDDDDDDDPPPPPPPTTTTTTTQQQQQQQQQVVVVVVVHHHHHHHHHHKKKKKKKKKSSSSSSLLLLLLLLQQQQQQQQQRRRRRRRRRRRIIIIIIIIRRRRRRRRRRREEEEEEEEERRRRRRRRRRRKKKKKKKKKLLLLLLLLAAAAANNNNNNNNFFFFFFFFFFFIIIIIIIIPPPPPPPWWWWWWWWWWWWWWGGGGPPPPPPPAAAAASSSSSSIIIIIIIIQQQQQQQQQVVVVVVVAAAAALLLLLLLLSSSSSSRRRRRRRRRRRKKKKKKKKKSSSSSSPPPPPPPYYYYYYYYYYYYLLLLLLLLPPPPPPPSSSSSSAAAAAHHHHHHHHHHRRRRRRRRRRRVVVVVVVSSSSSSGGGGLLLLLLLLMMMMMMMMMMMMMMMMAAAAANNNNNNNNHHHHHHHHHHTTTTTTTSSSSSSIIIIIIIISSSSSSSSSSSSLLLLLLLLFFFFFFFFFFFEEEEEEEEESSSSSSSSSSSSCCCCCCQQQQQQQQQQQQQQQQQQYYYYYYYYYYYYDDDDDDDDKKKKKKKKKLLLLLLLLWWWWWWWWWWWWWWKKKKKKKKKRRRRRRRRRRRGGGGAAAAAFFFFFFFFFFFLLLLLLLLEEEEEEEEEQQQQQQQQQFFFFFFFFFFFRRRRRRRRRRRKKKKKKKKKEEEEEEEEEDDDDDDDDIIIIIIIIFFFFFFFFFFFKKKKKKKKKDDDDDDDDNNNNNNNNFFFFFFFFFFFEEEEEEEEEEEEEEEEEEMMMMMMMMHHHHHHHHHHRRRRRRRRRRRSSSSSSRRRRRRRRRRREEEEEEEEEVVVVVVVVVVVVVVQQQQQQQQQEEEEEEEEELLLLLLLLIIIIIIIIDDDDDDDDEEEEEEEEEYYYYYYYYYYYYHHHHHHHHHHAAAAAAAAAATTTTTTTRRRRRRRRRRRPPPPPPPDDDDDDDDYYYYYYYYYYYYIIIIIIIISSSSSSWWWWWWWWWWWWWWGGGGTTTTTTTQQQQQQQQQEEEEEEEEEQQQQQQQQQQ

SEQ ID NO: 272 - protein, 3712 aa, Oryza sativa
MMMMMMMMPPPPPPPRRRRRRRRRRREEEEEEEEEIIIIIIIIIIIIIIIITTTTTTTIIIIIIIIQQQQQQQQQVVVVVVVGGGGQQQQQQQQQCCCCCCGGGGNNNNNNNNQQQQQQQQQIIIIIIIIGGGGMMMMMMMMEEEEEEEEEFFFFFFFFFFFWWWWWWWWWWWWWWKKKKKKKKKQQQQQQQQQLLLLLLLLCCCCCCLLLLLLLLEEEEEEEEEHHHHHHHHHHGGGGIIIIIIIIGGGGKKKKKKKKKDDDDDDDDGGGGLLLLLLLLLLLLLLLLEEEEEEEEEDDDDDDDDFFFFFFFFFFFAAAAATTTTTTTQQQQQQQQQGGGGGGGGDDDDDDDDRRRRRRRRRRRKKKKKKKKKDDDDDDDDVVVVVVVFFFFFFFFFFFFFFFFFFFFFFYYYYYYYYYYYYQQQQQQQQQAAAAADDDDDDDDDDDDDDDDQQQQQQQQQHHHHHHHHHHYYYYYYYYYYYYIIIIIIIIPPPPPPPRRRRRRRRRRRAAAAALLLLLLLLLLLLLLLLVVVVVVVDDDDDDDDLLLLLLLLEEEEEEEEEPPPPPPPRRRRRRRRRRRVVVVVVVIIIIIIIINNNNNNNNGGGGIIIIIIIIQQQQQQQQQNNNNNNNNSSSSSSEEEEEEEEEYYYYYYYYYYYYRRRRRRRRRRRNNNNNNNNLLLLLLLLYYYYYYYYYYYYNNNNNNNNHHHHHHHHHHEEEEEEEEENNNNNNNNIIIIIIIIFFFFFFFFFFFVVVVVVVAAAAAEEEEEEEEEHHHHHHHHHHGGGGGGGGGGGGAAAAAGGGGNNNNNNNNNNNNNNNNWWWWWWWWWWWWWWAAAAASSSSSSGGGGYYYYYYYYYYYYHHHHHHHHHHQQQQQQQQQGGGGEEEEEEEEEQQQQQQQQQVVVVVVVVVVVVVVDDDDDDDDDDDDDDDDIIIIIIIIMMMMMMMMDDDDDDDDMMMMMMMMIIIIIIIIDDDDDDDDRRRRRRRRRRREEEEEEEEEAAAAADDDDDDDDGGGGSSSSSSDDDDDDDDSSSSSSLLLLLLLLEEEEEEEEEGGGGFFFFFFFFFFFVVVVVVVLLLLLLLLCCCCCCHHHHHHHHHHSSSSSSIIIIIIIIAAAAAGGGGGGGGTTTTTTTGGGGSSSSSSGGGGMMMMMMMMGGGGSSSSSSYYYYYYYYYYYYLLLLLLLLLLLLLLLLEEEEEEEEETTTTTTTLLLLLLLLNNNNNNNNDDDDDDDDRRRRRRRRRRRYYYYYYYYYYYYSSSSSSKKKKKKKKKKKKKKKKKKLLLLLLLLVVVVVVVQQQQQQQQQTTTTTTTYYYYYYYYYYYYSSSSSSVVVVVVVFFFFFFFFFFFPPPPPPPNNNNNNNNQQQQQQQQQMMMMMMMMEEEEEEEEETTTTTTTSSSSSSDDDDDDDDVVVVVVVVVVVVVVVVVVVVVQQQQQQQQQPPPPPPPYYYYYYYYYYYYNNNNNNNNSSSSSSLLLLLLLLLLLLLLLLTTTTTTTLLLLLLLLKKKKKKKKKRRRRRRRRRRRLLLLLLLLTTTTTTTLLLLLLLLNNNNNNNNAAAAADDDDDDDDCCCCCCVVVVVVVVVVVVVVVVVVVVVLLLLLLLLDDDDDDDDNNNNNNNNTTTTTTTAAAAALLLLLLLLNNNNNNNNRRRRRRRRRRRIIIIIIIIAAAAAVVVVVVVEEEEEEEEERRRRRRRRRRRLLLLLLLLHHHHHHHHHHLLLLLLLLAAAAANNNNNNNNPPPPPPPTTTTTTTFFFFFFFFFFFAAAAAQQQQQQQQQTTTTTTTNNNNNNNNSSSSSSLLLLLLLLVVVVVVVSSSSSSTTTTTTTVVVVVVVMMMMMMMMSSSSSSAAAAASSSSSSTTTTTTTTTTTTTTTTTTTTTLLLLLLLLRRRRRRRRRRRYYYYYYYYYYYYPPPPPPPGGGGYYYYYYYYYYYYMMMMMMMMNNNNNNNNNNNNNNNNDDDDDDDDLLLLLLLLVVVVVVVGGGGLLLLLLLLLLLLLLLLAAAAASSSSSSLLLLLLLLIIIIIIIIPPPPPPPTTTTTTTPPPPPPPRRRRRRRRRRRCCCCCCHHHHHHHHHHFFFFFFFFFFFLLLLLLLLMMMMMMMMTTTTTTTGGGGYYYYYYYYYYYYTTTTTTTPPPPPPPLLLLLLLLTTTTTTTVVVVVVVEEEEEEEEERRRRRRRRRRRQQQQQQQQQVVVVVVVNNNNNNNNMMMMMMMMIIIIIIIIRRRRRRRRRRRKKKKKKKKKTTTTTTTTTTTTTTVVVVVVVLLLLLLLLDDDDDDDDVVVVVVVMMMMMMMMRRRRRRRRRRRRRRRRRRRRRRLLLLLLLLLLLLLLLLQQQQQQQQQTTTTTTTKKKKKKKKKNNNNNNNNIIIIIIIIMMMMMMMMVVVVVVVSSSSSSSSSSSSYYYYYYYYYYYYAAAAARRRRRRRRRRRNNNNNNNNKKKKKKKKKEEEEEEEEEAAAAASSSSSSQQQQQQQQQAAAAAKKKKKKKKKYYYYYYYYYYYYIIIIIIIISSSSSSIIIIIIIILLLLLLLLNNNNNNNNIIIIIIIIIIIIIIIIQQQQQQQQQGGGGEEEEEEEEEVVVVVVVDDDDDDDDPPPPPPPTTTTTTTQQQQQQQQQVVVVVVVHHHHHHHHHHEEEEEEEEESSSSSSLLLLLLLLQQQQQQQQQRRRRRRRRRRRIIIIIIIIRRRRRRRRRRREEEEEEEEERRRRRRRRRRRKKKKKKKKKLLLLLLLLVVVVVVVNNNNNNNNFFFFFFFFFFFIIIIIIIIEEEEEEEEEWWWWWWWWWWWWWWGGGGPPPPPPPAAAAASSSSSSIIIIIIIIQQQQQQQQQVVVVVVVAAAAALLLLLLLLSSSSSSRRRRRRRRRRRKKKKKKKKKSSSSSSPPPPPPPYYYYYYYYYYYYVVVVVVVQQQQQQQQQTTTTTTTTTTTTTTHHHHHHHHHHRRRRRRRRRRRVVVVVVVSSSSSSGGGGLLLLLLLLMMMMMMMMLLLLLLLLAAAAANNNNNNNNHHHHHHHHHHTTTTTTTSSSSSSIIIIIIIIRRRRRRRRRRRHHHHHHHHHHLLLLLLLLFFFFFFFFFFFSSSSSSKKKKKKKKKCCCCCCLLLLLLLLGGGGQQQQQQQQQYYYYYYYYYYYYEEEEEEEEEKKKKKKKKKLLLLLLLLRRRRRRRRRRRKKKKKKKKKKKKKKKKKKQQQQQQQQQAAAAAFFFFFFFFFFFLLLLLLLLDDDDDDDDNNNNNNNNYYYYYYYYYYYYRRRRRRRRRRRKKKKKKKKKFFFFFFFFFFFPPPPPPPMMMMMMMMFFFFFFFFFFFEEEEEEEEEDDDDDDDDNNNNNNNNDDDDDDDDLLLLLLLLSSSSSSEEEEEEEEEFFFFFFFFFFFDDDDDDDDEEEEEEEEESSSSSSRRRRRRRRRRREEEEEEEEEIIIIIIIIIIIIIIIIEEEEEEEEESSSSSSLLLLLLLLVVVVVVVDDDDDDDDEEEEEEEEEYYYYYYYYYYYYKKKKKKKKKAAAAACCCCCCEEEEEEEEESSSSSSPPPPPPPDDDDDDDDYYYYYYYYYYYYIIIIIIIIKKKKKKKKKWWWWWWWWWWWWWWGGGGMMMMMMMMEEEEEEEEEDDDDDDDDAAAAAGGGGEEEEEEEEEAAAAANNNNNNNNVVVVVVVAAAAAAAAAAAAAAALLLLLLLLDDDDDDDDSSSSSSKKKKKKKKKLLLLLLLLVVVVVVVVVVVVVVV

SEQ ID NO: 273 - protein, 3342 aa, Zea mays
DDDDDDDDVVVVVVVFFFFFFFFFFFFFFFFFFFFFFYYYYYYYYYYYYQQQQQQQQQAAAAADDDDDDDDDDDDDDDDQQQQQQQQQHHHHHHHHHHFFFFFFFFFFFIIIIIIIIPPPPPPPRRRRRRRRRRRSSSSSSLLLLLLLLLLLLLLLLIIIIIIIIDDDDDDDDLLLLLLLLEEEEEEEEEPPPPPPPRRRRRRRRRRRVVVVVVVIIIIIIIINNNNNNNNGGGGIIIIIIIIQQQQQQQQQNNNNNNNNSSSSSSEEEEEEEEEYYYYYYYYYYYYRRRRRRRRRRRNNNNNNNNLLLLLLLLYYYYYYYYYYYYNNNNNNNNHHHHHHHHHHEEEEEEEEENNNNNNNNIIIIIIIIFFFFFFFFFFFVVVVVVVAAAAAEEEEEEEEEHHHHHHHHHHGGGGGGGGGGGGAAAAAGGGGNNNNNNNNNNNNNNNNWWWWWWWWWWWWWWAAAAASSSSSSGGGGYYYYYYYYYYYYHHHHHHHHHHQQQQQQQQQGGGGEEEEEEEEEQQQQQQQQQFFFFFFFFFFFVVVVVVVDDDDDDDDDDDDDDDDIIIIIIIIMMMMMMMMDDDDDDDDMMMMMMMMVVVVVVVDDDDDDDDRRRRRRRRRRREEEEEEEEEAAAAADDDDDDDDGGGGSSSSSSDDDDDDDDSSSSSSLLLLLLLLEEEEEEEEEGGGGFFFFFFFFFFFVVVVVVVLLLLLLLLCCCCCCHHHHHHHHHHSSSSSSIIIIIIIIAAAAAGGGGGGGGTTTTTTTGGGGSSSSSSGGGGMMMMMMMMGGGGSSSSSSYYYYYYYYYYYYLLLLLLLLLLLLLLLLEEEEEEEEETTTTTTTLLLLLLLLNNNNNNNNDDDDDDDDRRRRRRRRRRRYYYYYYYYYYYYSSSSSSKKKKKKKKKKKKKKKKKKLLLLLLLLVVVVVVVQQQQQQQQQTTTTTTTYYYYYYYYYYYYSSSSSSVVVVVVVFFFFFFFFFFFPPPPPPPNNNNNNNNQQQQQQQQQVVVVVVVEEEEEEEEETTTTTTTSSSSSSDDDDDDDDVVVVVVVVVVVVVVVVVVVVVQQQQQQQQQPPPPPPPYYYYYYYYYYYYNNNNNNNNSSSSSSLLLLLLLLLLLLLLLLTTTTTTTLLLLLLLLKKKKKKKKKRRRRRRRRRRRLLLLLLLLTTTTTTTLLLLLLLLNNNNNNNNAAAAADDDDDDDDCCCCCCVVVVVVVVVVVVVVVVVVVVVLLLLLLLLDDDDDDDDNNNNNNNNTTTTTTTAAAAALLLLLLLLNNNNNNNNRRRRRRRRRRRIIIIIIIIAAAAAVVVVVVVEEEEEEEEERRRRRRRRRRRLLLLLLLLHHHHHHHHHHLLLLLLLLSSSSSSNNNNNNNNPPPPPPPTTTTTTTFFFFFFFFFFFAAAAAQQQQQQQQQTTTTTTTNNNNNNNNSSSSSSLLLLLLLLVVVVVVVSSSSSSTTTTTTTVVVVVVVMMMMMMMMSSSSSSAAAAASSSSSSTTTTTTTTTTTTTTTTTTTTTLLLLLLLLRRRRRRRRRRRYYYYYYYYYYYYPPPPPPPGGGGYYYYYYYYYYYYMMMMMMMMNNNNNNNNNNNNNNNNDDDDDDDDLLLLLLLLVVVVVVVGGGGLLLLLLLLLLLLLLLLAAAAASSSSSSLLLLLLLLIIIIIIIIPPPPPPPTTTTTTTPPPPPPPRRRRRRRRRRRCCCCCCHHHHHHHHHHFFFFFFFFFFFLLLLLLLLMMMMMMMMTTTTTTTGGGGYYYYYYYYYYYYTTTTTTTPPPPPPPLLLLLLLLTTTTTTTVVVVVVVEEEEEEEEERRRRRRRRRRRQQQQQQQQQVVVVVVVNNNNNNNNMMMMMMMMIIIIIIIIRRRRRRRRRRRKKKKKKKKKTTTTTTTTTTTTTTVVVVVVVLLLLLLLLDDDDDDDDVVVVVVVMMMMMMMMRRRRRRRRRRRRRRRRRRRRRRLLLLLLLLLLLLLLLLQQQQQQQQQTTTTTTTKKKKKKKKKNNNNNNNNIIIIIIIIMMMMMMMMVVVVVVVSSSSSSSSSSSSYYYYYYYYYYYYAAAAARRRRRRRRRRRTTTTTTTKKKKKKKKKEEEEEEEEEAAAAASSSSSSQQQQQQQQQAAAAAKKKKKKKKKYYYYYYYYYYYYIIIIIIIISSSSSSIIIIIIIILLLLLLLLNNNNNNNNIIIIIIIIIIIIIIIIQQQQQQQQQGGGGEEEEEEEEEVVVVVVVDDDDDDDDPPPPPPPTTTTTTTQQQQQQQQQVVVVVVVHHHHHHHHHHEEEEEEEEESSSSSSLLLLLLLLQQQQQQQQQRRRRRRRRRRRIIIIIIIIRRRRRRRRRRREEEEEEEEERRRRRRRRRRRKKKKKKKKKLLLLLLLLVVVVVVVNNNNNNNNFFFFFFFFFFFIIIIIIIIDDDDDDDDWWWWWWWWWWWWWWAAAAAPPPPPPPAAAAASSSSSSIIIIIIIIQQQQQQQQQVVVVVVVAAAAALLLLLLLLSSSSSSRRRRRRRRRRRKKKKKKKKKSSSSSSPPPPPPPYYYYYYYYYYYYVVVVVVVQQQQQQQQQTTTTTTTTTTTTTTHHHHHHHHHHRRRRRRRRRRRVVVVVVVSSSSSSGGGGLLLLLLLLMMMMMMMMLLLLLLLLAAAAANNNNNNNNHHHHHHHHHHTTTTTTTSSSSSSIIIIIIIIRRRRRRRRRRRHHHHHHHHHHLLLLLLLLFFFFFFFFFFFSSSSSSKKKKKKKKKCCCCCCLLLLLLLLGGGGQQQQQQQQQYYYYYYYYYYYYEEEEEEEEEKKKKKKKKKLLLLLLLLRRRRRRRRRRRKKKKKKKKKKKKKKKKKKQQQQQQQQQAAAAAFFFFFFFFFFFLLLLLLLLDDDDDDDDNNNNNNNNYYYYYYYYYYYYRRRRRRRRRRRKKKKKKKKKFFFFFFFFFFFPPPPPPPMMMMMMMMFFFFFFFFFFFAAAAADDDDDDDDNNNNNNNNDDDDDDDDLLLLLLLLSSSSSSEEEEEEEEEFFFFFFFFFFFDDDDDDDDEEEEEEEEESSSSSSRRRRRRRRRRREEEEEEEEEIIIIIIIIIIIIIIIIEEEEEEEEESSSSSSLLLLLLLLVVVVVVVDDDDDDDDEEEEEEEEEYYYYYYYYYYYYKKKKKKKKKAAAAACCCCCCEEEEEEEEESSSSSSPPPPPPPDDDDDDDDYYYYYYYYYYYYIIIIIIIIKKKKKKKKKWWWWWWWWWWWWWWGGGGMMMMMMMMEEEEEEEEEDDDDDDDDPPPPPPPGGGGEEEEEEEEEAAAAANNNNNNNNVVVVVVVVVVVVVVAAAAAAAAAALLLLLLLLDDDDDDDDSSSSSSKKKKKKKKKLLLLLLLLVVVVVVVVVVVVVVV

SEQ ID NO: 274 - protein, 3729 aa, Anemia phyllitidis
MMMMMMMMPPPPPPPRRRRRRRRRRREEEEEEEEEIIIIIIIIIIIIIIIITTTTTTTLLLLLLLLQQQQQQQQQVVVVVVVGGGGQQQQQQQQQCCCCCCGGGGNNNNNNNNQQQQQQQQQIIIIIIIIGGGGMMMMMMMMEEEEEEEEEFFFFFFFFFFFWWWWWWWWWWWWWWKKKKKKKKKQQQQQQQQQLLLLLLLLCCCCCCLLLLLLLLEEEEEEEEEHHHHHHHHHHGGGGIIIIIIIISSSSSSKKKKKKKKKEEEEEEEEEGGGGMMMMMMMMLLLLLLLLEEEEEEEEEDDDDDDDDFFFFFFFFFFFAAAAATTTTTTTQQQQQQQQQGGGGGGGGDDDDDDDDRRRRRRRRRRRKKKKKKKKKDDDDDDDDVVVVVVVFFFFFFFFFFFFFFFFFFFFFFYYYYYYYYYYYYQQQQQQQQQAAAAADDDDDDDDDDDDDDDDEEEEEEEEEHHHHHHHHHHYYYYYYYYYYYYIIIIIIIIPPPPPPPRRRRRRRRRRRAAAAALLLLLLLLLLLLLLLLLLLLLLLLDDDDDDDDLLLLLLLLEEEEEEEEEPPPPPPPRRRRRRRRRRRVVVVVVVIIIIIIIINNNNNNNNGGGGIIIIIIIIQQQQQQQQQNNNNNNNNSSSSSSEEEEEEEEEYYYYYYYYYYYYRRRRRRRRRRRNNNNNNNNLLLLLLLLYYYYYYYYYYYYNNNNNNNNHHHHHHHHHHEEEEEEEEENNNNNNNNVVVVVVVFFFFFFFFFFFVVVVVVVAAAAADDDDDDDDHHHHHHHHHHGGGGGGGGGGGGAAAAAGGGGNNNNNNNNNNNNNNNNWWWWWWWWWWWWWWAAAAASSSSSSGGGGYYYYYYYYYYYYHHHHHHHHHHQQQQQQQQQGGGGEEEEEEEEEQQQQQQQQQVVVVVVVEEEEEEEEEEEEEEEEEEDDDDDDDDIIIIIIIIMMMMMMMMDDDDDDDDMMMMMMMMIIIIIIIIDDDDDDDDRRRRRRRRRRREEEEEEEEEAAAAADDDDDDDDGGGGSSSSSSDDDDDDDDSSSSSSLLLLLLLLEEEEEEEEEGGGGFFFFFFFFFFFVVVVVVVLLLLLLLLCCCCCCHHHHHHHHHHSSSSSSIIIIIIIIAAAAAGGGGGGGGTTTTTTTGGGGSSSSSSGGGGMMMMMMMMGGGGSSSSSSYYYYYYYYYYYYLLLLLLLLLLLLLLLLEEEEEEEEEAAAAALLLLLLLLNNNNNNNNDDDDDDDDRRRRRRRRRRRYYYYYYYYYYYYSSSSSSKKKKKKKKKKKKKKKKKKLLLLLLLLVVVVVVVQQQQQQQQQTTTTTTTYYYYYYYYYYYYSSSSSSVVVVVVVFFFFFFFFFFFPPPPPPPNNNNNNNNQQQQQQQQQMMMMMMMMEEEEEEEEETTTTTTTSSSSSSDDDDDDDDVVVVVVVVVVVVVVVVVVVVVQQQQQQQQQPPPPPPPYYYYYYYYYYYYNNNNNNNNSSSSSSLLLLLLLLLLLLLLLLTTTTTTTLLLLLLLLNNNNNNNNKKKKKKKKKRRRRRRRRRRRLLLLLLLLTTTTTTTIIIIIIIINNNNNNNNAAAAADDDDDDDDCCCCCCVVVVVVVVVVVVVVVVVVVVVLLLLLLLLDDDDDDDDNNNNNNNNTTTTTTTAAAAALLLLLLLLNNNNNNNNRRRRRRRRRRRIIIIIIIIAAAAAVVVVVVVDDDDDDDDRRRRRRRRRRRLLLLLLLLHHHHHHHHHHIIIIIIIIPPPPPPPNNNNNNNNPPPPPPPTTTTTTTFFFFFFFFFFFAAAAAQQQQQQQQQTTTTTTTNNNNNNNNSSSSSSLLLLLLLLVVVVVVVSSSSSSTTTTTTTVVVVVVVMMMMMMMMSSSSSSAAAAASSSSSSTTTTTTTTTTTTTTTTTTTTTLLLLLLLLRRRRRRRRRRRYYYYYYYYYYYYPPPPPPPGGGGYYYYYYYYYYYYMMMMMMMMNNNNNNNNNNNNNNNNDDDDDDDDLLLLLLLLVVVVVVVGGGGLLLLLLLLVVVVVVVAAAAASSSSSSLLLLLLLLIIIIIIIIPPPPPPPTTTTTTTPPPPPPPRRRRRRRRRRRCCCCCCHHHHHHHHHHFFFFFFFFFFFLLLLLLLLMMMMMMMMTTTTTTTGGGGYYYYYYYYYYYYTTTTTTTPPPPPPPLLLLLLLLTTTTTTTVVVVVVVEEEEEEEEERRRRRRRRRRRQQQQQQQQQAAAAANNNNNNNNAAAAAIIIIIIIIRRRRRRRRRRRKKKKKKKKKTTTTTTTTTTTTTTVVVVVVVLLLLLLLLDDDDDDDDVVVVVVVMMMMMMMMRRRRRRRRRRRRRRRRRRRRRRLLLLLLLLLLLLLLLLQQQQQQQQQAAAAAKKKKKKKKKNNNNNNNNIIIIIIIIMMMMMMMMVVVVVVVSSSSSSSSSSSSYYYYYYYYYYYYAAAAARRRRRRRRRRRTTTTTTTKKKKKKKKKEEEEEEEEEAAAAASSSSSSQQQQQQQQQAAAAAKKKKKKKKKYYYYYYYYYYYYIIIIIIIISSSSSSIIIIIIIILLLLLLLLNNNNNNNNIIIIIIIIIIIIIIIIQQQQQQQQQGGGGEEEEEEEEEVVVVVVVDDDDDDDDPPPPPPPTTTTTTTQQQQQQQQQVVVVVVVHHHHHHHHHHKKKKKKKKKSSSSSSLLLLLLLLQQQQQQQQQRRRRRRRRRRRIIIIIIIIRRRRRRRRRRREEEEEEEEERRRRRRRRRRRKKKKKKKKKLLLLLLLLAAAAANNNNNNNNFFFFFFFFFFFIIIIIIIIEEEEEEEEEWWWWWWWWWWWWWWGGGGPPPPPPPAAAAASSSSSSIIIIIIIIQQQQQQQQQVVVVVVVAAAAALLLLLLLLSSSSSSRRRRRRRRRRRKKKKKKKKKSSSSSSPPPPPPPYYYYYYYYYYYYVVVVVVVQQQQQQQQQTTTTTTTAAAAAHHHHHHHHHHRRRRRRRRRRRVVVVVVVSSSSSSGGGGLLLLLLLLMMMMMMMMLLLLLLLLAAAAASSSSSSHHHHHHHHHHTTTTTTTSSSSSSIIIIIIIIRRRRRRRRRRRHHHHHHHHHHLLLLLLLLFFFFFFFFFFFSSSSSSKKKKKKKKKCCCCCCIIIIIIIINNNNNNNNQQQQQQQQQYYYYYYYYYYYYEEEEEEEEEKKKKKKKKKLLLLLLLLRRRRRRRRRRRKKKKKKKKKKKKKKKKKKQQQQQQQQQAAAAAFFFFFFFFFFFLLLLLLLLDDDDDDDDNNNNNNNNYYYYYYYYYYYYRRRRRRRRRRRKKKKKKKKKFFFFFFFFFFFPPPPPPPMMMMMMMMFFFFFFFFFFFAAAAADDDDDDDDNNNNNNNNDDDDDDDDLLLLLLLLTTTTTTTEEEEEEEEEFFFFFFFFFFFDDDDDDDDEEEEEEEEESSSSSSRRRRRRRRRRREEEEEEEEEIIIIIIIIVVVVVVVQQQQQQQQQSSSSSSLLLLLLLLVVVVVVVDDDDDDDDEEEEEEEEEYYYYYYYYYYYYKKKKKKKKKAAAAACCCCCCEEEEEEEEESSSSSSAAAAADDDDDDDDYYYYYYYYYYYYIIIIIIIIKKKKKKKKKWWWWWWWWWWWWWWGGGGMMMMMMMMEEEEEEEEEDDDDDDDDRRRRRRRRRRRSSSSSSKKKKKKKKKTTTTTTTLLLLLLLLSSSSSSAAAAADDDDDDDDGGGGTTTTTTTMMMMMMMMDDDDDDDDLLLLLLLLSSSSSSLLLLLLLLPPPPPPPSSSSSSSSSSSSS

SEQ ID NO: 275 - protein, 3502 aa, Caenorhabditis elegans
MMMMMMMMSSSSSSGGGGTTTTTTTGGGGAAAAALLLLLLLLMMMMMMMMTTTTTTTVVVVVVVHHHHHHHHHHVVVVVVVGGGGQQQQQQQQQCCCCCCGGGGNNNNNNNNQQQQQQQQQLLLLLLLLAAAAAQQQQQQQQQAAAAAFFFFFFFFFFFWWWWWWWWWWWWWWKKKKKKKKKSSSSSSMMMMMMMMVVVVVVVDDDDDDDDEEEEEEEEEHHHHHHHHHHGGGGIIIIIIIINNNNNNNNEEEEEEEEERRRRRRRRRRRGGGGQQQQQQQQQTTTTTTTTTTTTTTHHHHHHHHHHEEEEEEEEEDDDDDDDDDDDDDDDDMMMMMMMMNNNNNNNNDDDDDDDDKKKKKKKKKKKKKKKKKKDDDDDDDDLLLLLLLLLLLLLLLLFFFFFFFFFFFYYYYYYYYYYYYQQQQQQQQQAAAAADDDDDDDDDDDDDDDDDDDDDDDDHHHHHHHHHHYYYYYYYYYYYYVVVVVVVPPPPPPPRRRRRRRRRRRAAAAAVVVVVVVLLLLLLLLVVVVVVVDDDDDDDDLLLLLLLLEEEEEEEEEPPPPPPPRRRRRRRRRRRVVVVVVVIIIIIIIINNNNNNNNGGGGMMMMMMMMMMMMMMMMQQQQQQQQQSSSSSSPPPPPPPNNNNNNNNFFFFFFFFFFFSSSSSSNNNNNNNNLLLLLLLLFFFFFFFFFFFNNNNNNNNTTTTTTTDDDDDDDDNNNNNNNNIIIIIIIIFFFFFFFFFFFMMMMMMMMSSSSSSDDDDDDDDHHHHHHHHHHGGGGGGGGGGGGAAAAAGGGGNNNNNNNNNNNNNNNNWWWWWWWWWWWWWWAAAAASSSSSSGGGGYYYYYYYYYYYYCCCCCCQQQQQQQQQGGGGQQQQQQQQQEEEEEEEEEVVVVVVVQQQQQQQQQEEEEEEEEEKKKKKKKKKIIIIIIIIMMMMMMMMDDDDDDDDIIIIIIIIIIIIIIIIIIIIIIIIRRRRRRRRRRREEEEEEEEEAAAAAEEEEEEEEENNNNNNNNTTTTTTTNNNNNNNNNNNNNNNNLLLLLLLLDDDDDDDDGGGGIIIIIIIILLLLLLLLFFFFFFFFFFFTTTTTTTHHHHHHHHHHSSSSSSVVVVVVVSSSSSSGGGGGGGGTTTTTTTGGGGSSSSSSGGGGTTTTTTTGGGGSSSSSSLLLLLLLLLLLLLLLLLLLLLLLLEEEEEEEEERRRRRRRRRRRLLLLLLLLRRRRRRRRRRREEEEEEEEEAAAAAFFFFFFFFFFFPPPPPPPKKKKKKKKKKKKKKKKKKVVVVVVVIIIIIIIIQQQQQQQQQTTTTTTTYYYYYYYYYYYYSSSSSSVVVVVVVFFFFFFFFFFFAAAAANNNNNNNNSSSSSSDDDDDDDDTTTTTTTSSSSSSTTTTTTTDDDDDDDDVVVVVVVVVVVVVVVVVVVVVHHHHHHHHHHPPPPPPPYYYYYYYYYYYYNNNNNNNNWWWWWWWWWWWWWWVVVVVVVLLLLLLLLSSSSSSMMMMMMMMQQQQQQQQQRRRRRRRRRRRLLLLLLLLIIIIIIIIEEEEEEEEENNNNNNNNPPPPPPPDDDDDDDDHHHHHHHHHHVVVVVVVVVVVVVVVVVVVVVLLLLLLLLDDDDDDDDNNNNNNNNAAAAAAAAAALLLLLLLLHHHHHHHHHHRRRRRRRRRRRLLLLLLLLAAAAAAAAAAGGGGKKKKKKKKKFFFFFFFFFFFKKKKKKKKKTTTTTTTDDDDDDDDTTTTTTTPPPPPPPTTTTTTTFFFFFFFFFFFDDDDDDDDHHHHHHHHHHIIIIIIIINNNNNNNNSSSSSSLLLLLLLLVVVVVVVAAAAARRRRRRRRRRRIIIIIIIIMMMMMMMMSSSSSSTTTTTTTSSSSSSTTTTTTTAAAAAPPPPPPPYYYYYYYYYYYYRRRRRRRRRRRFFFFFFFFFFFNNNNNNNNSSSSSSAAAAAMMMMMMMMCCCCCCPPPPPPPSSSSSSIIIIIIIIRRRRRRRRRRRYYYYYYYYYYYYLLLLLLLLDDDDDDDDLLLLLLLLAAAAAPPPPPPPFFFFFFFFFFFPPPPPPPPPPPPPPMMMMMMMMHHHHHHHHHHFFFFFFFFFFFIIIIIIIIQQQQQQQQQSSSSSSAAAAAIIIIIIIISSSSSSPPPPPPPVVVVVVVVVVVVVVDDDDDDDDPPPPPPPNNNNNNNNEEEEEEEEENNNNNNNNFFFFFFFFFFFTTTTTTTRRRRRRRRRRRKKKKKKKKKTTTTTTTSSSSSSVVVVVVVAAAAADDDDDDDDVVVVVVVTTTTTTTRRRRRRRRRRRFFFFFFFFFFFLLLLLLLLLLLLLLLLKKKKKKKKKPPPPPPPTTTTTTTSSSSSSMMMMMMMMMMMMMMMMVVVVVVVSSSSSSTTTTTTTAAAAASSSSSSRRRRRRRRRRRVVVVVVVRRRRRRRRRRRPPPPPPPNNNNNNNNDDDDDDDDCCCCCCMMMMMMMMLLLLLLLLSSSSSSAAAAAYYYYYYYYYYYYMMMMMMMMFFFFFFFFFFFLLLLLLLLQQQQQQQQQGGGGQQQQQQQQQIIIIIIIIEEEEEEEEEAAAAAHHHHHHHHHHTTTTTTTIIIIIIIIMMMMMMMMTTTTTTTAAAAAEEEEEEEEEQQQQQQQQQNNNNNNNNVVVVVVVDDDDDDDDFFFFFFFFFFFAAAAAIIIIIIIIRRRRRRRRRRRRRRRRRRRRRRPPPPPPPPPPPPPPFFFFFFFFFFFYYYYYYYYYYYYMMMMMMMMLLLLLLLLKKKKKKKKKPPPPPPPLLLLLLLLRRRRRRRRRRRMMMMMMMMMMMMMMMMHHHHHHHHHHAAAAAPPPPPPPLLLLLLLLSSSSSSPPPPPPPYYYYYYYYYYYYVVVVVVVRRRRRRRRRRRPPPPPPPQQQQQQQQQYYYYYYYYYYYYKKKKKKKKKVVVVVVVSSSSSSGGGGLLLLLLLLLLLLLLLLLLLLLLLLNNNNNNNNNNNNNNNNSSSSSSTTTTTTTSSSSSSVVVVVVVAAAAAPPPPPPPLLLLLLLLFFFFFFFFFFFEEEEEEEEESSSSSSLLLLLLLLLLLLLLLLSSSSSSKKKKKKKKKYYYYYYYYYYYYDDDDDDDDKKKKKKKKKLLLLLLLLRRRRRRRRRRRSSSSSSKKKKKKKKKRRRRRRRRRRRAAAAAFFFFFFFFFFFIIIIIIIIDDDDDDDDKKKKKKKKKFFFFFFFFFFFEEEEEEEEEKKKKKKKKKIIIIIIIIDDDDDDDDNNNNNNNNFFFFFFFFFFFSSSSSSLLLLLLLLDDDDDDDDMMMMMMMMMMMMMMMMDDDDDDDDDDDDDDDDAAAAAMMMMMMMMHHHHHHHHHHIIIIIIIIVVVVVVVQQQQQQQQQDDDDDDDDLLLLLLLLLLLLLLLLDDDDDDDDEEEEEEEEEYYYYYYYYYYYYKKKKKKKKKAAAAAVVVVVVVVVVVVVVQQQQQQQQQKKKKKKKKKDDDDDDDDYYYYYYYYYYYYLLLLLLLLTTTTTTTRRRRRRRRRRRGGGGLLLLLLLLL

SEQ ID NO: 276 - protein, 3974 aa, Candida albicans
MMMMMMMMPPPPPPPGGGGEEEEEEEEETTTTTTTIIIIIIIITTTTTTTLLLLLLLLQQQQQQQQQVVVVVVVGGGGQQQQQQQQQCCCCCCGGGGNNNNNNNNQQQQQQQQQVVVVVVVGGGGLLLLLLLLQQQQQQQQQYYYYYYYYYYYYWWWWWWWWWWWWWWQQQQQQQQQQQQQQQQQQLLLLLLLLAAAAATTTTTTTEEEEEEEEEHHHHHHHHHHGGGGIIIIIIIIQQQQQQQQQSSSSSSDDDDDDDDGGGGSSSSSSSSSSSSTTTTTTTPPPPPPPYYYYYYYYYYYYPPPPPPPKKKKKKKKKDDDDDDDDIIIIIIIINNNNNNNNDDDDDDDDLLLLLLLLQQQQQQQQQLLLLLLLLQQQQQQQQQEEEEEEEEELLLLLLLLNNNNNNNNNNNNNNNNSSSSSSGGGGSSSSSSSSSSSSPPPPPPPQQQQQQQQQSSSSSSYYYYYYYYYYYYPPPPPPPQQQQQQQQQQQQQQQQQQTTTTTTTKKKKKKKKKPPPPPPPNNNNNNNNGGGGKKKKKKKKKYYYYYYYYYYYYRRRRRRRRRRRNNNNNNNNDDDDDDDDHHHHHHHHHHPPPPPPPEEEEEEEEELLLLLLLLFFFFFFFFFFFFFFFFFFFFFFTTTTTTTLLLLLLLLSSSSSSDDDDDDDDSSSSSSNNNNNNNNTTTTTTTYYYYYYYYYYYYTTTTTTTPPPPPPPRRRRRRRRRRRSSSSSSIIIIIIIILLLLLLLLIIIIIIIIDDDDDDDDMMMMMMMMEEEEEEEEEPPPPPPPSSSSSSVVVVVVVIIIIIIIIAAAAAKKKKKKKKKSSSSSSTTTTTTTSSSSSSAAAAALLLLLLLLPPPPPPPMMMMMMMMFFFFFFFFFFFNNNNNNNNPPPPPPPRRRRRRRRRRRNNNNNNNNVVVVVVVHHHHHHHHHHLLLLLLLLSSSSSSNNNNNNNNQQQQQQQQQGGGGNNNNNNNNGGGGAAAAAAAAAANNNNNNNNNNNNNNNNWWWWWWWWWWWWWWIIIIIIIINNNNNNNNGGGGYYYYYYYYYYYYKKKKKKKKKYYYYYYYYYYYYGGGGTTTTTTTEEEEEEEEEEEEEEEEEEEEEEEEEEEEEEEEEEEETTTTTTTLLLLLLLLLLLLLLLLNNNNNNNNLLLLLLLLIIIIIIIIDDDDDDDDRRRRRRRRRRREEEEEEEEEVVVVVVVDDDDDDDDKKKKKKKKKCCCCCCDDDDDDDDNNNNNNNNLLLLLLLLSSSSSSNNNNNNNNFFFFFFFFFFFQQQQQQQQQLLLLLLLLFFFFFFFFFFFHHHHHHHHHHSSSSSSVVVVVVVAAAAAGGGGGGGGTTTTTTTGGGGSSSSSSGGGGVVVVVVVGGGGSSSSSSKKKKKKKKKMMMMMMMMLLLLLLLLEEEEEEEEEVVVVVVVIIIIIIIISSSSSSDDDDDDDDRRRRRRRRRRRYYYYYYYYYYYYGGGGHHHHHHHHHHKKKKKKKKKKKKKKKKKKLLLLLLLLLLLLLLLLNNNNNNNNTTTTTTTFFFFFFFFFFFSSSSSSIIIIIIIIFFFFFFFFFFFPPPPPPPSSSSSSNNNNNNNNEEEEEEEEEDDDDDDDDTTTTTTTSSSSSSDDDDDDDDVVVVVVVVVVVVVVVVVVVVVQQQQQQQQQPPPPPPPYYYYYYYYYYYYNNNNNNNNTTTTTTTIIIIIIIILLLLLLLLTTTTTTTLLLLLLLLKKKKKKKKKRRRRRRRRRRRLLLLLLLLIIIIIIIIDDDDDDDDYYYYYYYYYYYYSSSSSSDDDDDDDDAAAAATTTTTTTFFFFFFFFFFFVVVVVVVFFFFFFFFFFFHHHHHHHHHHNNNNNNNNDDDDDDDDSSSSSSLLLLLLLLNNNNNNNNRRRRRRRRRRRIIIIIIIIEEEEEEEEENNNNNNNNIIIIIIIILLLLLLLLFFFFFFFFFFFNNNNNNNNNNNNNNNNNNNNNNNNSSSSSSNNNNNNNNIIIIIIIIQQQQQQQQQHHHHHHHHHHDDDDDDDDDDDDDDDDNNNNNNNNDDDDDDDDLLLLLLLLFFFFFFFFFFFLLLLLLLLGGGGAAAAANNNNNNNNKKKKKKKKKLLLLLLLLIIIIIIIIAAAAALLLLLLLLVVVVVVVSSSSSSAAAAASSSSSSVVVVVVVSSSSSSNNNNNNNNPPPPPPPLLLLLLLLRRRRRRRRRRRFFFFFFFFFFFPPPPPPPGGGGYYYYYYYYYYYYMMMMMMMMYYYYYYYYYYYYSSSSSSSSSSSSMMMMMMMMEEEEEEEEESSSSSSIIIIIIIIVVVVVVVSSSSSSNNNNNNNNLLLLLLLLIIIIIIIIPPPPPPPTTTTTTTPPPPPPPDDDDDDDDLLLLLLLLKKKKKKKKKFFFFFFFFFFFLLLLLLLLTTTTTTTSSSSSSSSSSSSIIIIIIIIAAAAAPPPPPPPFFFFFFFFFFFSSSSSSTTTTTTTQQQQQQQQQKKKKKKKKKHHHHHHHHHHNNNNNNNNYYYYYYYYYYYYLLLLLLLLNNNNNNNNEEEEEEEEEYYYYYYYYYYYYDDDDDDDDMMMMMMMMLLLLLLLLLLLLLLLLEEEEEEEEELLLLLLLLSSSSSSNNNNNNNNDDDDDDDDRRRRRRRRRRRYYYYYYYYYYYYKKKKKKKKKTTTTTTTNNNNNNNNRRRRRRRRRRRVVVVVVVGGGGGGGGDDDDDDDDTTTTTTTSSSSSSYYYYYYYYYYYYIIIIIIIISSSSSSMMMMMMMMLLLLLLLLNNNNNNNNYYYYYYYYYYYYLLLLLLLLIIIIIIIIGGGGYYYYYYYYYYYYNNNNNNNNLLLLLLLLDDDDDDDDQQQQQQQQQRRRRRRRRRRREEEEEEEEEIIIIIIIIRRRRRRRRRRRKKKKKKKKKGGGGIIIIIIIILLLLLLLLKKKKKKKKKSSSSSSQQQQQQQQQQQQQQQQQQRRRRRRRRRRRIIIIIIIISSSSSSFFFFFFFFFFFVVVVVVVPPPPPPPWWWWWWWWWWWWWWVVVVVVVAAAAARRRRRRRRRRRSSSSSSVVVVVVVLLLLLLLLVVVVVVVVVVVVVVHHHHHHHHHHGGGGKKKKKKKKKKKKKKKKKKSSSSSSPPPPPPPYYYYYYYYYYYYLLLLLLLLKKKKKKKKKNNNNNNNNTTTTTTTNNNNNNNNLLLLLLLLEEEEEEEEEGGGGIIIIIIIIQQQQQQQQQVVVVVVVTTTTTTTNNNNNNNNNNNNNNNNTTTTTTTSSSSSSMMMMMMMMIIIIIIIIDDDDDDDDVVVVVVVFFFFFFFFFFFTTTTTTTKKKKKKKKKIIIIIIIILLLLLLLLKKKKKKKKKQQQQQQQQQFFFFFFFFFFFDDDDDDDDLLLLLLLLLLLLLLLLIIIIIIIIKKKKKKKKKRRRRRRRRRRRKKKKKKKKKAAAAAYYYYYYYYYYYYLLLLLLLLNNNNNNNNRRRRRRRRRRRYYYYYYYYYYYYYYYYYYYYYYYYSSSSSSSSSSSSVVVVVVVEEEEEEEEEEEEEEEEEEEEEEEEEEENNNNNNNNEEEEEEEEEVVVVVVVMMMMMMMMEEEEEEEEEMMMMMMMMFFFFFFFFFFFNNNNNNNNEEEEEEEEESSSSSSRRRRRRRRRRREEEEEEEEESSSSSSVVVVVVVKKKKKKKKKSSSSSSIIIIIIIIIIIIIIIIDDDDDDDDEEEEEEEEEYYYYYYYYYYYYKKKKKKKKKAAAAACCCCCCKKKKKKKKKEEEEEEEEEIIIIIIIITTTTTTTYYYYYYYYYYYYLLLLLLLLDDDDDDDDDDDDDDDDDDDDDDDDDDDDDDDDEEEEEEEEEDDDDDDDDDDDDDDDDLLLLLLLLEEEEEEEEEDDDDDDDDGGGGDDDDDDDDGGGGGGGGGGGGGGGGGGGGNNNNNNNNGGGGNNNNNNNNGGGGYYYYYYYYYYYYNNNNNNNNNNNNNNNNIIIIIIIIDDDDDDDDDDDDDDDDAAAAADDDDDDDDMMMMMMMMGGGGIIIIIIII

SEQ ID NO: 277 - protein, 3661 aa, Chlamydomonas reinhardtii
MMMMMMMMPPPPPPPRRRRRRRRRRREEEEEEEEEIIIIIIIIIIIIIIIINNNNNNNNLLLLLLLLQQQQQQQQQVVVVVVVGGGGQQQQQQQQQCCCCCCGGGGNNNNNNNNQQQQQQQQQVVVVVVVGGGGSSSSSSEEEEEEEEEFFFFFFFFFFFWWWWWWWWWWWWWWRRRRRRRRRRRKKKKKKKKKLLLLLLLLCCCCCCQQQQQQQQQEEEEEEEEEHHHHHHHHHHGGGGIIIIIIIIAAAAAKKKKKKKKKDDDDDDDDGGGGRRRRRRRRRRRLLLLLLLLEEEEEEEEEDDDDDDDDFFFFFFFFFFFAAAAATTTTTTTLLLLLLLLGGGGGGGGDDDDDDDDRRRRRRRRRRRKKKKKKKKKDDDDDDDDVVVVVVVFFFFFFFFFFFFFFFFFFFFFFYYYYYYYYYYYYQQQQQQQQQAAAAADDDDDDDDDDDDDDDDEEEEEEEEEQQQQQQQQQYYYYYYYYYYYYIIIIIIIIPPPPPPPRRRRRRRRRRRAAAAAIIIIIIIILLLLLLLLLLLLLLLLDDDDDDDDLLLLLLLLEEEEEEEEEPPPPPPPRRRRRRRRRRRVVVVVVVIIIIIIIINNNNNNNNGGGGIIIIIIIIQQQQQQQQQTTTTTTTSSSSSSDDDDDDDDLLLLLLLLRRRRRRRRRRRNNNNNNNNLLLLLLLLFFFFFFFFFFFNNNNNNNNPPPPPPPEEEEEEEEENNNNNNNNIIIIIIIIFFFFFFFFFFFIIIIIIIISSSSSSKKKKKKKKKEEEEEEEEEGGGGGGGGGGGGAAAAAGGGGNNNNNNNNNNNNNNNNWWWWWWWWWWWWWWAAAAASSSSSSGGGGYYYYYYYYYYYYTTTTTTTQQQQQQQQQGGGGEEEEEEEEEAAAAAVVVVVVVQQQQQQQQQEEEEEEEEETTTTTTTLLLLLLLLLLLLLLLLDDDDDDDDMMMMMMMMIIIIIIIIDDDDDDDDRRRRRRRRRRREEEEEEEEEAAAAAEEEEEEEEEYYYYYYYYYYYYCCCCCCDDDDDDDDSSSSSSLLLLLLLLEEEEEEEEEGGGGFFFFFFFFFFFNNNNNNNNMMMMMMMMCCCCCCHHHHHHHHHHSSSSSSIIIIIIIIAAAAAGGGGGGGGTTTTTTTGGGGSSSSSSGGGGMMMMMMMMGGGGSSSSSSYYYYYYYYYYYYMMMMMMMMLLLLLLLLEEEEEEEEELLLLLLLLIIIIIIIISSSSSSDDDDDDDDRRRRRRRRRRRYYYYYYYYYYYYSSSSSSKKKKKKKKKKKKKKKKKKLLLLLLLLIIIIIIIIQQQQQQQQQTTTTTTTYYYYYYYYYYYYSSSSSSVVVVVVVFFFFFFFFFFFPPPPPPPNNNNNNNNQQQQQQQQQSSSSSSEEEEEEEEESSSSSSSSSSSSDDDDDDDDVVVVVVVVVVVVVVVVVVVVVQQQQQQQQQPPPPPPPYYYYYYYYYYYYNNNNNNNNSSSSSSLLLLLLLLLLLLLLLLTTTTTTTLLLLLLLLKKKKKKKKKRRRRRRRRRRRLLLLLLLLTTTTTTTLLLLLLLLHHHHHHHHHHAAAAADDDDDDDDAAAAAVVVVVVVVVVVVVVVVVVVVVLLLLLLLLDDDDDDDDNNNNNNNNTTTTTTTAAAAALLLLLLLLDDDDDDDDKKKKKKKKKIIIIIIIIAAAAAVVVVVVVEEEEEEEEERRRRRRRRRRRLLLLLLLLHHHHHHHHHHLLLLLLLLHHHHHHHHHHKKKKKKKKKPPPPPPPDDDDDDDDVVVVVVVQQQQQQQQQQQQQQQQQQIIIIIIIINNNNNNNNSSSSSSLLLLLLLLIIIIIIIIAAAAATTTTTTTVVVVVVVMMMMMMMMAAAAAAAAAASSSSSSTTTTTTTTTTTTTTTTTTTTTLLLLLLLLRRRRRRRRRRRYYYYYYYYYYYYPPPPPPPGGGGYYYYYYYYYYYYMMMMMMMMNNNNNNNNNNNNNNNNDDDDDDDDLLLLLLLLVVVVVVVGGGGLLLLLLLLVVVVVVVAAAAASSSSSSLLLLLLLLIIIIIIIIPPPPPPPTTTTTTTPPPPPPPRRRRRRRRRRRCCCCCCHHHHHHHHHHFFFFFFFFFFFLLLLLLLLMMMMMMMMTTTTTTTGGGGYYYYYYYYYYYYTTTTTTTPPPPPPPLLLLLLLLTTTTTTTAAAAAEEEEEEEEENNNNNNNNAAAAAAAAAAGGGGQQQQQQQQQVVVVVVVTTTTTTTSSSSSSNNNNNNNNIIIIIIIIRRRRRRRRRRRKKKKKKKKKTTTTTTTTTTTTTTVVVVVVVLLLLLLLLDDDDDDDDVVVVVVVMMMMMMMMRRRRRRRRRRRRRRRRRRRRRRLLLLLLLLLLLLLLLLQQQQQQQQQPPPPPPPKKKKKKKKKNNNNNNNNIIIIIIIIMMMMMMMMVVVVVVVSSSSSSTTTTTTTHHHHHHHHHHTTTTTTTKKKKKKKKKSSSSSSRRRRRRRRRRRDDDDDDDDIIIIIIIIAAAAANNNNNNNNAAAAAKKKKKKKKKYYYYYYYYYYYYIIIIIIIISSSSSSIIIIIIIILLLLLLLLNNNNNNNNIIIIIIIIIIIIIIIIQQQQQQQQQGGGGEEEEEEEEEVVVVVVVDDDDDDDDPPPPPPPSSSSSSQQQQQQQQQVVVVVVVHHHHHHHHHHKKKKKKKKKSSSSSSLLLLLLLLQQQQQQQQQRRRRRRRRRRRIIIIIIIIRRRRRRRRRRREEEEEEEEERRRRRRRRRRRKKKKKKKKKQQQQQQQQQAAAAANNNNNNNNFFFFFFFFFFFIIIIIIIIEEEEEEEEEWWWWWWWWWWWWWWGGGGPPPPPPPAAAAASSSSSSIIIIIIIIQQQQQQQQQVVVVVVVAAAAALLLLLLLLSSSSSSKKKKKKKKKKKKKKKKKKSSSSSSPPPPPPPYYYYYYYYYYYYVVVVVVVQQQQQQQQQTTTTTTTAAAAAHHHHHHHHHHRRRRRRRRRRRVVVVVVVSSSSSSGGGGLLLLLLLLMMMMMMMMLLLLLLLLAAAAANNNNNNNNHHHHHHHHHHTTTTTTTSSSSSSVVVVVVVRRRRRRRRRRRHHHHHHHHHHLLLLLLLLFFFFFFFFFFFNNNNNNNNKKKKKKKKKVVVVVVVLLLLLLLLRRRRRRRRRRRDDDDDDDDYYYYYYYYYYYYEEEEEEEEEKKKKKKKKKLLLLLLLLMMMMMMMMGGGGPPPPPPPKKKKKKKKKQQQQQQQQQEEEEEEEEERRRRRRRRRRRQQQQQQQQQAAAAAFFFFFFFFFFFMMMMMMMMQQQQQQQQQAAAAAYYYYYYYYYYYYRRRRRRRRRRRDDDDDDDDVVVVVVVPPPPPPPRRRRRRRRRRRFFFFFFFFFFFAAAAADDDDDDDDAAAAAAAAAAGGGGGGGGGGGGTTTTTTTAAAAALLLLLLLLLLLLLLLLEEEEEEEEEEEEEEEEEEFFFFFFFFFFFAAAAADDDDDDDDAAAAAKKKKKKKKKEEEEEEEEEVVVVVVVVVVVVVVQQQQQQQQQDDDDDDDDLLLLLLLLAAAAANNNNNNNNEEEEEEEEEYYYYYYYYYYYYAAAAAAAAAACCCCCCEEEEEEEEESSSSSSAAAAADDDDDDDDYYYYYYYYYYYYIIIIIIIIQQQQQQQQQRRRRRRRRRRRQQQQQQQQQMMMMMMMMMMMMMMMMAAAAASSSSSSS

SEQ ID NO: 278 - protein, 2072 aa, Cochliobolus heterostrophus
LLLLLLLLAAAAADDDDDDDDLLLLLLLLEEEEEEEEEPPPPPPPRRRRRRRRRRRVVVVVVVLLLLLLLLHHHHHHHHHHSSSSSSIIIIIIIIQQQQQQQQQAAAAASSSSSSPPPPPPPYYYYYYYYYYYYKKKKKKKKKNNNNNNNNIIIIIIIIYYYYYYYYYYYYNNNNNNNNPPPPPPPEEEEEEEEENNNNNNNNFFFFFFFFFFFYYYYYYYYYYYYIIIIIIIIHHHHHHHHHHKKKKKKKKKDDDDDDDDGGGGTTTTTTTGGGGAAAAAGGGGNNNNNNNNNNNNNNNNWWWWWWWWWWWWWWGGGGMMMMMMMMGGGGYYYYYYYYYYYYSSSSSSMMMMMMMMGGGGEEEEEEEEEQQQQQQQQQVVVVVVVHHHHHHHHHHEEEEEEEEEDDDDDDDDIIIIIIIIWWWWWWWWWWWWWWDDDDDDDDMMMMMMMMIIIIIIIIDDDDDDDDRRRRRRRRRRREEEEEEEEEAAAAADDDDDDDDGGGGSSSSSSDDDDDDDDSSSSSSLLLLLLLLEEEEEEEEEGGGGFFFFFFFFFFFMMMMMMMMMMMMMMMMLLLLLLLLHHHHHHHHHHSSSSSSIIIIIIIIAAAAAGGGGGGGGTTTTTTTGGGGSSSSSSGGGGLLLLLLLLGGGGSSSSSSYYYYYYYYYYYYMMMMMMMMLLLLLLLLEEEEEEEEERRRRRRRRRRRLLLLLLLLNNNNNNNNDDDDDDDDRRRRRRRRRRRFFFFFFFFFFFPPPPPPPKKKKKKKKKKKKKKKKKKLLLLLLLLIIIIIIIIQQQQQQQQQTTTTTTTYYYYYYYYYYYYSSSSSSVVVVVVVFFFFFFFFFFFPPPPPPPNNNNNNNNTTTTTTTQQQQQQQQQDDDDDDDDGGGGDDDDDDDDIIIIIIIIVVVVVVVVVVVVVVQQQQQQQQQPPPPPPPYYYYYYYYYYYYNNNNNNNNSSSSSSLLLLLLLLLLLLLLLLSSSSSSMMMMMMMMRRRRRRRRRRRRRRRRRRRRRRLLLLLLLLTTTTTTTQQQQQQQQQNNNNNNNNAAAAADDDDDDDDSSSSSSVVVVVVVVVVVVVVVVVVVVVLLLLLLLLDDDDDDDDNNNNNNNNGGGGAAAAALLLLLLLLTTTTTTTRRRRRRRRRRRIIIIIIIIAAAAAAAAAADDDDDDDDRRRRRRRRRRRLLLLLLLLHHHHHHHHHHVVVVVVVMMMMMMMMTTTTTTTPPPPPPPSSSSSSFFFFFFFFFFFEEEEEEEEEQQQQQQQQQTTTTTTTNNNNNNNNQQQQQQQQQLLLLLLLLVVVVVVVSSSSSSTTTTTTTVVVVVVVMMMMMMMMSSSSSSAAAAASSSSSSTTTTTTTTTTTTTTTTTTTTTLLLLLLLLRRRRRRRRRRRYYYYYYYYYYYYPPPPPPPAAAAAYYYYYYYYYYYYSSSSSSHHHHHHHHHHNNNNNNNNDDDDDDDDLLLLLLLLVVVVVVVGGGGIIIIIIIIVVVVVVVAAAAASSSSSSLLLLLLLLIIIIIIIIPPPPPPPTTTTTTTPPPPPPPRRRRRRRRRRRCCCCCCHHHHHHHHHHFFFFFFFFFFFLLLLLLLLMMMMMMMMTTTTTTTSSSSSSYYYYYYYYYYYYTTTTTTTFFFFFFFFFFFSSSSSSGGGGEEEEEEEEENNNNNNNNVVVVVVVEEEEEEEEEQQQQQQQQQAAAAAKKKKKKKKKTTTTTTTVVVVVVVRRRRRRRRRRRKKKKKKKKKTTTTTTTTTTTTTTVVVVVVVLLLLLLLLDDDDDDDDVVVVVVVMMMMMMMMRRRRRRRRRRRRRRRRRRRRRRLLLLLLLLLLLLLLLLQQQQQQQQQPPPPPPPKKKKKKKKKNNNNNNNNRRRRRRRRRRRMMMMMMMMVVVVVVVSSSSSSTTTTTTTNNNNNNNNPPPPPPPTTTTTTTSSSSSSHHHHHHHHHHKKKKKKKKKSSSSSSCCCCCCYYYYYYYYYYYYMMMMMMMMSSSSSSIIIIIIIILLLLLLLLNNNNNNNNIIIIIIIIIIIIIIIIQQQQQQQQQAAAAAKKKKKKKKKPPPPPPPTTTTTTTPPPPPPPQQQQQQQQQQ

SEQ ID NO: 279 - protein, 3575 aa, Emericella nidulans
MMMMMMMMPPPPPPPRRRRRRRRRRREEEEEEEEEIIIIIIIIIIIIIIIITTTTTTTIIIIIIIIQQQQQQQQQAAAAAGGGGQQQQQQQQQCCCCCCGGGGNNNNNNNNNNNNNNNNVVVVVVVGGGGSSSSSSQQQQQQQQQFFFFFFFFFFFWWWWWWWWWWWWWWQQQQQQQQQQQQQQQQQQLLLLLLLLCCCCCCLLLLLLLLEEEEEEEEEHHHHHHHHHHGGGGIIIIIIIISSSSSSQQQQQQQQQDDDDDDDDGGGGNNNNNNNNLLLLLLLLEEEEEEEEEEEEEEEEEEFFFFFFFFFFFAAAAATTTTTTTEEEEEEEEEGGGGGGGGDDDDDDDDRRRRRRRRRRRKKKKKKKKKDDDDDDDDVVVVVVVFFFFFFFFFFFFFFFFFFFFFFYYYYYYYYYYYYQQQQQQQQQSSSSSSDDDDDDDDDDDDDDDDTTTTTTTRRRRRRRRRRRYYYYYYYYYYYYIIIIIIIIPPPPPPPRRRRRRRRRRRAAAAAIIIIIIIILLLLLLLLLLLLLLLLDDDDDDDDLLLLLLLLEEEEEEEEEPPPPPPPRRRRRRRRRRRVVVVVVVLLLLLLLLNNNNNNNNGGGGIIIIIIIIQQQQQQQQQSSSSSSGGGGPPPPPPPYYYYYYYYYYYYKKKKKKKKKNNNNNNNNIIIIIIIIYYYYYYYYYYYYNNNNNNNNPPPPPPPEEEEEEEEENNNNNNNNFFFFFFFFFFFFFFFFFFFFFFIIIIIIIIGGGGQQQQQQQQQQQQQQQQQQGGGGIIIIIIIIGGGGAAAAAGGGGNNNNNNNNNNNNNNNNWWWWWWWWWWWWWWGGGGAAAAAGGGGYYYYYYYYYYYYAAAAAAAAAAGGGGEEEEEEEEEVVVVVVVVVVVVVVQQQQQQQQQEEEEEEEEEEEEEEEEEEVVVVVVVFFFFFFFFFFFDDDDDDDDMMMMMMMMIIIIIIIIDDDDDDDDRRRRRRRRRRREEEEEEEEEAAAAADDDDDDDDGGGGSSSSSSDDDDDDDDSSSSSSLLLLLLLLEEEEEEEEEGGGGFFFFFFFFFFFMMMMMMMMFFFFFFFFFFFLLLLLLLLHHHHHHHHHHSSSSSSIIIIIIIIAAAAAGGGGGGGGTTTTTTTGGGGSSSSSSGGGGLLLLLLLLGGGGSSSSSSFFFFFFFFFFFLLLLLLLLLLLLLLLLEEEEEEEEERRRRRRRRRRRMMMMMMMMNNNNNNNNDDDDDDDDRRRRRRRRRRRFFFFFFFFFFFPPPPPPPKKKKKKKKKKKKKKKKKKLLLLLLLLIIIIIIIIQQQQQQQQQTTTTTTTYYYYYYYYYYYYSSSSSSVVVVVVVFFFFFFFFFFFPPPPPPPDDDDDDDDTTTTTTTQQQQQQQQQAAAAAAAAAADDDDDDDDVVVVVVVVVVVVVVVVVVVVVNNNNNNNNPPPPPPPYYYYYYYYYYYYNNNNNNNNSSSSSSLLLLLLLLLLLLLLLLAAAAAMMMMMMMMRRRRRRRRRRRRRRRRRRRRRRLLLLLLLLTTTTTTTQQQQQQQQQNNNNNNNNAAAAADDDDDDDDSSSSSSVVVVVVVVVVVVVVVVVVVVVLLLLLLLLDDDDDDDDNNNNNNNNAAAAAAAAAALLLLLLLLSSSSSSRRRRRRRRRRRIIIIIIIIVVVVVVVAAAAADDDDDDDDRRRRRRRRRRRLLLLLLLLHHHHHHHHHHVVVVVVVQQQQQQQQQEEEEEEEEEPPPPPPPSSSSSSFFFFFFFFFFFQQQQQQQQQQQQQQQQQQTTTTTTTNNNNNNNNRRRRRRRRRRRLLLLLLLLVVVVVVVSSSSSSTTTTTTTVVVVVVVMMMMMMMMSSSSSSAAAAASSSSSSTTTTTTTTTTTTTTTTTTTTTLLLLLLLLRRRRRRRRRRRYYYYYYYYYYYYPPPPPPPGGGGYYYYYYYYYYYYMMMMMMMMHHHHHHHHHHNNNNNNNNDDDDDDDDLLLLLLLLVVVVVVVGGGGIIIIIIIIIIIIIIIIAAAAASSSSSSLLLLLLLLIIIIIIIIPPPPPPPTTTTTTTPPPPPPPRRRRRRRRRRRSSSSSSHHHHHHHHHHFFFFFFFFFFFLLLLLLLLLLLLLLLLTTTTTTTSSSSSSYYYYYYYYYYYYTTTTTTTPPPPPPPFFFFFFFFFFFTTTTTTTGGGGDDDDDDDDNNNNNNNNIIIIIIIIDDDDDDDDQQQQQQQQQAAAAAKKKKKKKKKTTTTTTTVVVVVVVRRRRRRRRRRRKKKKKKKKKTTTTTTTTTTTTTTVVVVVVVLLLLLLLLDDDDDDDDVVVVVVVMMMMMMMMRRRRRRRRRRRRRRRRRRRRRRLLLLLLLLLLLLLLLLQQQQQQQQQPPPPPPPKKKKKKKKKNNNNNNNNRRRRRRRRRRRMMMMMMMMVVVVVVVSSSSSSIIIIIIIINNNNNNNNPPPPPPPSSSSSSKKKKKKKKKSSSSSSSSSSSSCCCCCCYYYYYYYYYYYYIIIIIIIISSSSSSIIIIIIIILLLLLLLLNNNNNNNNIIIIIIIIIIIIIIIIQQQQQQQQQGGGGEEEEEEEEEAAAAADDDDDDDDPPPPPPPTTTTTTTDDDDDDDDVVVVVVVHHHHHHHHHHKKKKKKKKKSSSSSSLLLLLLLLLLLLLLLLRRRRRRRRRRRIIIIIIIIRRRRRRRRRRREEEEEEEEERRRRRRRRRRRRRRRRRRRRRRLLLLLLLLAAAAASSSSSSFFFFFFFFFFFIIIIIIIIPPPPPPPWWWWWWWWWWWWWWGGGGPPPPPPPAAAAASSSSSSIIIIIIIIQQQQQQQQQVVVVVVVAAAAALLLLLLLLTTTTTTTKKKKKKKKKKKKKKKKKKSSSSSSPPPPPPPYYYYYYYYYYYYIIIIIIIIQQQQQQQQQNNNNNNNNTTTTTTTHHHHHHHHHHRRRRRRRRRRRVVVVVVVSSSSSSGGGGLLLLLLLLMMMMMMMMLLLLLLLLAAAAANNNNNNNNHHHHHHHHHHTTTTTTTSSSSSSVVVVVVVAAAAATTTTTTTLLLLLLLLFFFFFFFFFFFKKKKKKKKKRRRRRRRRRRRIIIIIIIIVVVVVVVQQQQQQQQQQQQQQQQQQYYYYYYYYYYYYDDDDDDDDRRRRRRRRRRRLLLLLLLLRRRRRRRRRRRKKKKKKKKKRRRRRRRRRRRNNNNNNNNAAAAAFFFFFFFFFFFLLLLLLLLEEEEEEEEEQQQQQQQQQYYYYYYYYYYYYKKKKKKKKKKKKKKKKKKEEEEEEEEEAAAAAPPPPPPPFFFFFFFFFFFQQQQQQQQQDDDDDDDDGGGGLLLLLLLLDDDDDDDDEEEEEEEEEFFFFFFFFFFFDDDDDDDDEEEEEEEEEAAAAARRRRRRRRRRRAAAAAVVVVVVVVVVVVVVMMMMMMMMDDDDDDDDLLLLLLLLVVVVVVVGGGGEEEEEEEEEYYYYYYYYYYYYEEEEEEEEEAAAAAAAAAAEEEEEEEEERRRRRRRRRRREEEEEEEEENNNNNNNNYYYYYYYYYYYYLLLLLLLLDDDDDDDDPPPPPPPDDDDDDDDAAAAAGGGGKKKKKKKKKDDDDDDDDEEEEEEEEEVVVVVVVGGGGVVVVVVVV

SEQ ID NO: 280 - protein, 3650 aa, Entamoeba histolytica
MMMMMMMMPPPPPPPRRRRRRRRRRREEEEEEEEEIIIIIIIIIIIIIIIITTTTTTTLLLLLLLLNNNNNNNNVVVVVVVGGGGQQQQQQQQQCCCCCCGGGGNNNNNNNNQQQQQQQQQLLLLLLLLGGGGSSSSSSEEEEEEEEEFFFFFFFFFFFFFFFFFFFFFFKKKKKKKKKKKKKKKKKKIIIIIIIICCCCCCSSSSSSEEEEEEEEEHHHHHHHHHHGGGGIIIIIIIILLLLLLLLPPPPPPPDDDDDDDDGGGGSSSSSSLLLLLLLLSSSSSSTTTTTTTNNNNNNNNEEEEEEEEEFFFFFFFFFFFIIIIIIIIDDDDDDDDDDDDDDDDRRRRRRRRRRRKKKKKKKKKDDDDDDDDVVVVVVVFFFFFFFFFFFFFFFFFFFFFFYYYYYYYYYYYYQQQQQQQQQAAAAADDDDDDDDDDDDDDDDQQQQQQQQQRRRRRRRRRRRYYYYYYYYYYYYVVVVVVVPPPPPPPRRRRRRRRRRRSSSSSSIIIIIIIINNNNNNNNIIIIIIIIDDDDDDDDLLLLLLLLEEEEEEEEEPPPPPPPRRRRRRRRRRRVVVVVVVLLLLLLLLDDDDDDDDSSSSSSIIIIIIIIRRRRRRRRRRRTTTTTTTSSSSSSEEEEEEEEEWWWWWWWWWWWWWWRRRRRRRRRRRNNNNNNNNFFFFFFFFFFFYYYYYYYYYYYYNNNNNNNNPPPPPPPEEEEEEEEENNNNNNNNFFFFFFFFFFFIIIIIIIIIIIIIIIIPPPPPPPTTTTTTTNNNNNNNNNNNNNNNNGGGGAAAAAGGGGNNNNNNNNSSSSSSWWWWWWWWWWWWWWAAAAANNNNNNNNGGGGYYYYYYYYYYYYYYYYYYYYYYYYTTTTTTTTTTTTTTEEEEEEEEEKKKKKKKKKMMMMMMMMSSSSSSEEEEEEEEEIIIIIIIIEEEEEEEEEEEEEEEEEEIIIIIIIIIIIIIIIIDDDDDDDDRRRRRRRRRRREEEEEEEEEVVVVVVVEEEEEEEEEHHHHHHHHHHCCCCCCDDDDDDDDSSSSSSLLLLLLLLEEEEEEEEEGGGGFFFFFFFFFFFFFFFFFFFFFFFFFFFFFFFFFCCCCCCHHHHHHHHHHSSSSSSIIIIIIIICCCCCCGGGGGGGGTTTTTTTGGGGSSSSSSGGGGLLLLLLLLGGGGSSSSSSKKKKKKKKKIIIIIIIIMMMMMMMMEEEEEEEEEMMMMMMMMIIIIIIIISSSSSSEEEEEEEEEKKKKKKKKKYYYYYYYYYYYYPPPPPPPKKKKKKKKKNNNNNNNNIIIIIIIILLLLLLLLTTTTTTTSSSSSSFFFFFFFFFFFSSSSSSVVVVVVVMMMMMMMMVVVVVVVKKKKKKKKKEEEEEEEEENNNNNNNNPPPPPPPDDDDDDDDVVVVVVVVVVVVVVVVVVVVVSSSSSSPPPPPPPYYYYYYYYYYYYNNNNNNNNSSSSSSIIIIIIIILLLLLLLLTTTTTTTLLLLLLLLRRRRRRRRRRRRRRRRRRRRRRLLLLLLLLIIIIIIIITTTTTTTEEEEEEEEECCCCCCQQQQQQQQQSSSSSSVVVVVVVVVVVVVVVVVVVVVFFFFFFFFFFFDDDDDDDDNNNNNNNNSSSSSSAAAAALLLLLLLLAAAAADDDDDDDDIIIIIIIITTTTTTTHHHHHHHHHHTTTTTTTQQQQQQQQQFFFFFFFFFFFGGGGVVVVVVVDDDDDDDDEEEEEEEEEAAAAATTTTTTTVVVVVVVFFFFFFFFFFFDDDDDDDDMMMMMMMMNNNNNNNNSSSSSSIIIIIIIIIIIIIIIISSSSSSSSSSSSSSSSSSMMMMMMMMSSSSSSAAAAAFFFFFFFFFFFTTTTTTTAAAAANNNNNNNNLLLLLLLLRRRRRRRRRRRFFFFFFFFFFFPPPPPPPSSSSSSTTTTTTTLLLLLLLLYYYYYYYYYYYYNNNNNNNNSSSSSSLLLLLLLLNNNNNNNNSSSSSSLLLLLLLLMMMMMMMMIIIIIIIIHHHHHHHHHHLLLLLLLLCCCCCCPPPPPPPSSSSSSRRRRRRRRRRRFFFFFFFFFFFSSSSSSHHHHHHHHHHFFFFFFFFFFFLLLLLLLLMMMMMMMMTTTTTTTSSSSSSYYYYYYYYYYYYTTTTTTTPPPPPPPLLLLLLLLRRRRRRRRRRRQQQQQQQQQVVVVVVVNNNNNNNNQQQQQQQQQIIIIIIIISSSSSSSSSSSSRRRRRRRRRRRTTTTTTTSSSSSSAAAAAIIIIIIIIDDDDDDDDVVVVVVVMMMMMMMMKKKKKKKKKRRRRRRRRRRRLLLLLLLLIIIIIIIIQQQQQQQQQPPPPPPPQQQQQQQQQNNNNNNNNIIIIIIIIMMMMMMMMAAAAARRRRRRRRRRRTTTTTTTRRRRRRRRRRRLLLLLLLLKKKKKKKKKEEEEEEEEEGGGGKKKKKKKKKYYYYYYYYYYYYIIIIIIIISSSSSSMMMMMMMMCCCCCCDDDDDDDDFFFFFFFFFFFFFFFFFFFFFFQQQQQQQQQGGGGDDDDDDDDVVVVVVVSSSSSSYYYYYYYYYYYYDDDDDDDDEEEEEEEEEIIIIIIIINNNNNNNNEEEEEEEEEAAAAALLLLLLLLQQQQQQQQQRRRRRRRRRRRFFFFFFFFFFFTTTTTTTDDDDDDDDRRRRRRRRRRRRRRRRRRRRRRLLLLLLLLAAAAAEEEEEEEEEFFFFFFFFFFFVVVVVVVPPPPPPPWWWWWWWWWWWWWWNNNNNNNNKKKKKKKKKEEEEEEEEEAAAAAIIIIIIIIKKKKKKKKKVVVVVVVVVVVVVVHHHHHHHHHHTTTTTTTRRRRRRRRRRRVVVVVVVSSSSSSPPPPPPPLLLLLLLLVVVVVVVKKKKKKKKKRRRRRRRRRRRGGGGNNNNNNNNRRRRRRRRRRRMMMMMMMMSSSSSSGGGGMMMMMMMMLLLLLLLLLLLLLLLLAAAAANNNNNNNNNNNNNNNNTTTTTTTSSSSSSIIIIIIIIRRRRRRRRRRRYYYYYYYYYYYYYYYYYYYYYYYYFFFFFFFFFFFQQQQQQQQQDDDDDDDDIIIIIIIILLLLLLLLKKKKKKKKKAAAAAFFFFFFFFFFFDDDDDDDDQQQQQQQQQMMMMMMMMFFFFFFFFFFFKKKKKKKKKKKKKKKKKKRRRRRRRRRRRVVVVVVVYYYYYYYYYYYYLLLLLLLLQQQQQQQQQTTTTTTTDDDDDDDDRRRRRRRRRRRDDDDDDDDNNNNNNNNLLLLLLLLRRRRRRRRRRRKKKKKKKKKFFFFFFFFFFFPPPPPPPEEEEEEEEEFFFFFFFFFFFEEEEEEEEEEEEEEEEEESSSSSSKKKKKKKKKEEEEEEEEEIIIIIIIIVVVVVVVKKKKKKKKKCCCCCCVVVVVVVIIIIIIIIEEEEEEEEEEEEEEEEEEYYYYYYYYYYYYAAAAAKKKKKKKKKAAAAAEEEEEEEEESSSSSSIIIIIIIIEEEEEEEEEYYYYYYYYYYYYSSSSSSHHHHHHHHHHYYYYYYYYYYYYSSSSSSYYYYYYYYYYYYPPPPPPPIIIIIIIIHHHHHHHHHHKKKKKKKKKYYYYYYYYYYYYLLLLLLLLKKKKKKKKKGGGGIIIIIIIIAAAAAKKKKKKKKKEEEEEEEEEKKKKKKKKKIIIIIIIIAAAAAEEEEEEEEEE

SEQ ID NO: 281 - protein, 3661 aa, Euplotes aediculatus
MMMMMMMMPPPPPPPRRRRRRRRRRREEEEEEEEEIIIIIIIIIIIIIIIITTTTTTTCCCCCCQQQQQQQQQVVVVVVVGGGGQQQQQQQQQCCCCCCGGGGNNNNNNNNQQQQQQQQQIIIIIIIIGGGGMMMMMMMMEEEEEEEEEFFFFFFFFFFFWWWWWWWWWWWWWWKKKKKKKKKQQQQQQQQQLLLLLLLLCCCCCCMMMMMMMMEEEEEEEEEHHHHHHHHHHGGGGIIIIIIIINNNNNNNNPPPPPPPEEEEEEEEEGGGGIIIIIIIILLLLLLLLEEEEEEEEEDDDDDDDDFFFFFFFFFFFAAAAAVVVVVVVNNNNNNNNGGGGEEEEEEEEEDDDDDDDDRRRRRRRRRRRKKKKKKKKKDDDDDDDDVVVVVVVFFFFFFFFFFFFFFFFFFFFFFYYYYYYYYYYYYQQQQQQQQQAAAAADDDDDDDDDDDDDDDDEEEEEEEEEHHHHHHHHHHYYYYYYYYYYYYVVVVVVVPPPPPPPRRRRRRRRRRRAAAAAVVVVVVVLLLLLLLLIIIIIIIIDDDDDDDDLLLLLLLLEEEEEEEEEPPPPPPPRRRRRRRRRRRVVVVVVVIIIIIIIINNNNNNNNCCCCCCIIIIIIIIQQQQQQQQQKKKKKKKKKSSSSSSTTTTTTTYYYYYYYYYYYYSSSSSSSSSSSSLLLLLLLLYYYYYYYYYYYYNNNNNNNNPPPPPPPEEEEEEEEENNNNNNNNIIIIIIIIYYYYYYYYYYYYIIIIIIIIAAAAAKKKKKKKKKHHHHHHHHHHGGGGGGGGGGGGAAAAAGGGGNNNNNNNNNNNNNNNNWWWWWWWWWWWWWWGGGGRRRRRRRRRRRGGGGYYYYYYYYYYYYTTTTTTTDDDDDDDDAAAAAEEEEEEEEEKKKKKKKKKVVVVVVVQQQQQQQQQDDDDDDDDEEEEEEEEEIIIIIIIILLLLLLLLEEEEEEEEEMMMMMMMMIIIIIIIIDDDDDDDDRRRRRRRRRRREEEEEEEEEAAAAADDDDDDDDGGGGSSSSSSDDDDDDDDSSSSSSLLLLLLLLEEEEEEEEEGGGGFFFFFFFFFFFVVVVVVVLLLLLLLLTTTTTTTHHHHHHHHHHSSSSSSIIIIIIIIAAAAAGGGGGGGGTTTTTTTGGGGSSSSSSGGGGFFFFFFFFFFFGGGGSSSSSSYYYYYYYYYYYYLLLLLLLLLLLLLLLLEEEEEEEEERRRRRRRRRRRIIIIIIIINNNNNNNNDDDDDDDDHHHHHHHHHHYYYYYYYYYYYYPPPPPPPKKKKKKKKKKKKKKKKKKLLLLLLLLIIIIIIIIQQQQQQQQQTTTTTTTYYYYYYYYYYYYSSSSSSVVVVVVVFFFFFFFFFFFPPPPPPPIIIIIIIIEEEEEEEEENNNNNNNNDDDDDDDDVVVVVVVVVVVVVVVVVVVVVQQQQQQQQQPPPPPPPYYYYYYYYYYYYNNNNNNNNCCCCCCLLLLLLLLLLLLLLLLSSSSSSIIIIIIIIKKKKKKKKKRRRRRRRRRRRLLLLLLLLTTTTTTTLLLLLLLLNNNNNNNNAAAAADDDDDDDDCCCCCCVVVVVVVVVVVVVVVVVVVVVLLLLLLLLDDDDDDDDNNNNNNNNNNNNNNNNAAAAALLLLLLLLTTTTTTTSSSSSSIIIIIIIIAAAAAVVVVVVVDDDDDDDDRRRRRRRRRRRLLLLLLLLKKKKKKKKKIIIIIIIILLLLLLLLQQQQQQQQQPPPPPPPTTTTTTTFFFFFFFFFFFSSSSSSQQQQQQQQQIIIIIIIINNNNNNNNSSSSSSIIIIIIIIVVVVVVVSSSSSSTTTTTTTVVVVVVVMMMMMMMMAAAAAAAAAASSSSSSTTTTTTTTTTTTTTTTTTTTTLLLLLLLLRRRRRRRRRRRYYYYYYYYYYYYPPPPPPPGGGGYYYYYYYYYYYYMMMMMMMMNNNNNNNNNNNNNNNNDDDDDDDDMMMMMMMMVVVVVVVGGGGLLLLLLLLIIIIIIIIAAAAASSSSSSLLLLLLLLVVVVVVVPPPPPPPTTTTTTTPPPPPPPRRRRRRRRRRRCCCCCCHHHHHHHHHHFFFFFFFFFFFLLLLLLLLMMMMMMMMTTTTTTTGGGGYYYYYYYYYYYYTTTTTTTPPPPPPPLLLLLLLLSSSSSSLLLLLLLLDDDDDDDDQQQQQQQQQKKKKKKKKKYYYYYYYYYYYYTTTTTTTSSSSSSVVVVVVVRRRRRRRRRRRKKKKKKKKKTTTTTTTTTTTTTTFFFFFFFFFFFLLLLLLLLDDDDDDDDVVVVVVVMMMMMMMMRRRRRRRRRRRRRRRRRRRRRRLLLLLLLLLLLLLLLLQQQQQQQQQTTTTTTTKKKKKKKKKNNNNNNNNIIIIIIIIMMMMMMMMVVVVVVVTTTTTTTGGGGAAAAAVVVVVVVKKKKKKKKKKKKKKKKKKGGGGAAAAAYYYYYYYYYYYYMMMMMMMMSSSSSSIIIIIIIILLLLLLLLNNNNNNNNVVVVVVVIIIIIIIIQQQQQQQQQGGGGDDDDDDDDVVVVVVVDDDDDDDDPPPPPPPTTTTTTTQQQQQQQQQVVVVVVVHHHHHHHHHHKKKKKKKKKSSSSSSLLLLLLLLQQQQQQQQQRRRRRRRRRRRIIIIIIIIKKKKKKKKKEEEEEEEEERRRRRRRRRRRKKKKKKKKKLLLLLLLLAAAAANNNNNNNNFFFFFFFFFFFIIIIIIIIPPPPPPPWWWWWWWWWWWWWWGGGGPPPPPPPAAAAASSSSSSIIIIIIIIQQQQQQQQQVVVVVVVAAAAALLLLLLLLAAAAAKKKKKKKKKKKKKKKKKKSSSSSSPPPPPPPYYYYYYYYYYYYIIIIIIIIDDDDDDDDSSSSSSGGGGHHHHHHHHHHKKKKKKKKKVVVVVVVSSSSSSGGGGLLLLLLLLMMMMMMMMLLLLLLLLAAAAANNNNNNNNHHHHHHHHHHTTTTTTTGGGGIIIIIIIIRRRRRRRRRRRSSSSSSIIIIIIIIFFFFFFFFFFFKKKKKKKKKVVVVVVVLLLLLLLLYYYYYYYYYYYYDDDDDDDDQQQQQQQQQYYYYYYYYYYYYRRRRRRRRRRRTTTTTTTFFFFFFFFFFFRRRRRRRRRRRKKKKKKKKKRRRRRRRRRRRDDDDDDDDAAAAAYYYYYYYYYYYYMMMMMMMMNNNNNNNNIIIIIIIIFFFFFFFFFFFKKKKKKKKKQQQQQQQQQTTTTTTTKKKKKKKKKIIIIIIIIFFFFFFFFFFFEEEEEEEEEDDDDDDDDNNNNNNNNLLLLLLLLDDDDDDDDEEEEEEEEEFFFFFFFFFFFDDDDDDDDSSSSSSSSSSSSDDDDDDDDEEEEEEEEEVVVVVVVVVVVVVVKKKKKKKKKNNNNNNNNLLLLLLLLIIIIIIIIDDDDDDDDEEEEEEEEEYYYYYYYYYYYYAAAAAAAAAAAAAAAEEEEEEEEEKKKKKKKKKMMMMMMMMDDDDDDDDYYYYYYYYYYYYIIIIIIIINNNNNNNNWWWWWWWWWWWWWWGGGGNNNNNNNNDDDDDDDDDDDDDDDDDDDDDDDDDDDDDDDDMMMMMMMMQQQQQQQQQFFFFFFFFFFFDDDDDDDDPPPPPPPRRRRRRRRRRREEEEEEEEEPPPPPPPPPPPPPPKKKKKKKKKFFFFFFFFFFFSSSSSSNNNNNNNNIIIIIIIIQQQQQQQQQQ

SEQ ID NO: 282 - protein, 3623 aa, Neurospora crassa
MMMMMMMMPPPPPPPRRRRRRRRRRREEEEEEEEEIIIIIIIIIIIIIIIITTTTTTTIIIIIIIIQQQQQQQQQAAAAAGGGGQQQQQQQQQCCCCCCGGGGNNNNNNNNSSSSSSIIIIIIIIGGGGSSSSSSQQQQQQQQQFFFFFFFFFFFWWWWWWWWWWWWWWQQQQQQQQQQQQQQQQQQLLLLLLLLCCCCCCLLLLLLLLEEEEEEEEEHHHHHHHHHHGGGGIIIIIIIISSSSSSQQQQQQQQQDDDDDDDDGGGGTTTTTTTIIIIIIIIEEEEEEEEEDDDDDDDDFFFFFFFFFFFAAAAATTTTTTTEEEEEEEEEGGGGGGGGDDDDDDDDRRRRRRRRRRRKKKKKKKKKDDDDDDDDVVVVVVVFFFFFFFFFFFFFFFFFFFFFFYYYYYYYYYYYYQQQQQQQQQSSSSSSDDDDDDDDDDDDDDDDTTTTTTTRRRRRRRRRRRYYYYYYYYYYYYIIIIIIIIPPPPPPPRRRRRRRRRRRSSSSSSIIIIIIIILLLLLLLLIIIIIIIIDDDDDDDDLLLLLLLLEEEEEEEEEPPPPPPPRRRRRRRRRRRVVVVVVVIIIIIIIINNNNNNNNTTTTTTTIIIIIIIIQQQQQQQQQTTTTTTTGGGGPPPPPPPYYYYYYYYYYYYRRRRRRRRRRRNNNNNNNNIIIIIIIIYYYYYYYYYYYYNNNNNNNNPPPPPPPEEEEEEEEENNNNNNNNFFFFFFFFFFFYYYYYYYYYYYYVVVVVVVGGGGKKKKKKKKKSSSSSSGGGGLLLLLLLLGGGGAAAAAGGGGNNNNNNNNNNNNNNNNWWWWWWWWWWWWWWGGGGDDDDDDDDGGGGYYYYYYYYYYYYQQQQQQQQQTTTTTTTGGGGEEEEEEEEEQQQQQQQQQVVVVVVVHHHHHHHHHHEEEEEEEEEEEEEEEEEEIIIIIIIIMMMMMMMMEEEEEEEEEMMMMMMMMIIIIIIIIEEEEEEEEERRRRRRRRRRREEEEEEEEEAAAAADDDDDDDDGGGGSSSSSSDDDDDDDDSSSSSSLLLLLLLLEEEEEEEEEGGGGFFFFFFFFFFFMMMMMMMMMMMMMMMMLLLLLLLLHHHHHHHHHHSSSSSSIIIIIIIIAAAAAGGGGGGGGTTTTTTTGGGGSSSSSSGGGGLLLLLLLLGGGGSSSSSSFFFFFFFFFFFLLLLLLLLLLLLLLLLEEEEEEEEERRRRRRRRRRRLLLLLLLLNNNNNNNNDDDDDDDDRRRRRRRRRRRFFFFFFFFFFFPPPPPPPKKKKKKKKKKKKKKKKKKIIIIIIIIIIIIIIIIQQQQQQQQQTTTTTTTYYYYYYYYYYYYSSSSSSVVVVVVVFFFFFFFFFFFPPPPPPPDDDDDDDDTTTTTTTTTTTTTTSSSSSSAAAAAGGGGDDDDDDDDVVVVVVVVVVVVVVVVVVVVVHHHHHHHHHHPPPPPPPYYYYYYYYYYYYNNNNNNNNSSSSSSLLLLLLLLLLLLLLLLAAAAAMMMMMMMMRRRRRRRRRRRRRRRRRRRRRRLLLLLLLLTTTTTTTQQQQQQQQQNNNNNNNNAAAAADDDDDDDDSSSSSSVVVVVVVVVVVVVVVVVVVVVLLLLLLLLDDDDDDDDNNNNNNNNGGGGAAAAALLLLLLLLSSSSSSHHHHHHHHHHIIIIIIIIAAAAAAAAAADDDDDDDDRRRRRRRRRRRLLLLLLLLHHHHHHHHHHVVVVVVVQQQQQQQQQEEEEEEEEEPPPPPPPSSSSSSFFFFFFFFFFFQQQQQQQQQQQQQQQQQQTTTTTTTNNNNNNNNQQQQQQQQQLLLLLLLLVVVVVVVSSSSSSTTTTTTTVVVVVVVMMMMMMMMSSSSSSAAAAASSSSSSTTTTTTTTTTTTTTTTTTTTTLLLLLLLLRRRRRRRRRRRYYYYYYYYYYYYPPPPPPPGGGGYYYYYYYYYYYYMMMMMMMMHHHHHHHHHHNNNNNNNNDDDDDDDDLLLLLLLLVVVVVVVSSSSSSIIIIIIIILLLLLLLLAAAAASSSSSSLLLLLLLLIIIIIIIIPPPPPPPTTTTTTTPPPPPPPRRRRRRRRRRRCCCCCCHHHHHHHHHHFFFFFFFFFFFLLLLLLLLMMMMMMMMTTTTTTTSSSSSSYYYYYYYYYYYYTTTTTTTPPPPPPPFFFFFFFFFFFTTTTTTTGGGGDDDDDDDDQQQQQQQQQVVVVVVVEEEEEEEEEQQQQQQQQQAAAAAKKKKKKKKKTTTTTTTVVVVVVVRRRRRRRRRRRKKKKKKKKKTTTTTTTTTTTTTTVVVVVVVLLLLLLLLDDDDDDDDVVVVVVVMMMMMMMMRRRRRRRRRRRRRRRRRRRRRRLLLLLLLLLLLLLLLLQQQQQQQQQPPPPPPPKKKKKKKKKNNNNNNNNRRRRRRRRRRRMMMMMMMMVVVVVVVSSSSSSTTTTTTTVVVVVVVPPPPPPPGGGGKKKKKKKKKKKKKKKKKKSSSSSSCCCCCCYYYYYYYYYYYYIIIIIIIISSSSSSIIIIIIIILLLLLLLLNNNNNNNNVVVVVVVIIIIIIIIQQQQQQQQQGGGGDDDDDDDDVVVVVVVDDDDDDDDPPPPPPPTTTTTTTDDDDDDDDVVVVVVVHHHHHHHHHHKKKKKKKKKSSSSSSLLLLLLLLLLLLLLLLRRRRRRRRRRRIIIIIIIIRRRRRRRRRRREEEEEEEEERRRRRRRRRRRRRRRRRRRRRRLLLLLLLLAAAAATTTTTTTFFFFFFFFFFFIIIIIIIIPPPPPPPWWWWWWWWWWWWWWGGGGPPPPPPPAAAAASSSSSSIIIIIIIIQQQQQQQQQVVVVVVVAAAAALLLLLLLLTTTTTTTKKKKKKKKKRRRRRRRRRRRSSSSSSPPPPPPPYYYYYYYYYYYYVVVVVVVTTTTTTTMMMMMMMMAAAAAHHHHHHHHHHRRRRRRRRRRRVVVVVVVSSSSSSGGGGLLLLLLLLMMMMMMMMLLLLLLLLAAAAANNNNNNNNHHHHHHHHHHTTTTTTTSSSSSSIIIIIIIIAAAAATTTTTTTLLLLLLLLFFFFFFFFFFFKKKKKKKKKRRRRRRRRRRRIIIIIIIIVVVVVVVRRRRRRRRRRRQQQQQQQQQYYYYYYYYYYYYDDDDDDDDGGGGMMMMMMMMRRRRRRRRRRRKKKKKKKKKRRRRRRRRRRRNNNNNNNNAAAAAFFFFFFFFFFFMMMMMMMMEEEEEEEEEAAAAAYYYYYYYYYYYYKKKKKKKKKKKKKKKKKKTTTTTTTAAAAAPPPPPPPFFFFFFFFFFFSSSSSSEEEEEEEEENNNNNNNNLLLLLLLLNNNNNNNNEEEEEEEEEFFFFFFFFFFFDDDDDDDDEEEEEEEEEAAAAARRRRRRRRRRREEEEEEEEEVVVVVVVVVVVVVVMMMMMMMMDDDDDDDDLLLLLLLLIIIIIIIIAAAAADDDDDDDDYYYYYYYYYYYYEEEEEEEEEAAAAAAAAAAEEEEEEEEEDDDDDDDDAAAAANNNNNNNNYYYYYYYYYYYYLLLLLLLLNNNNNNNNPPPPPPPEEEEEEEEELLLLLLLLGGGGEEEEEEEEENNNNNNNNAAAAASSSSSSAAAAADDDDDDDDTTTTTTTDDDDDDDDKKKKKKKKKRRRRRRRRRRRMMMMMMMMAAAAAA

SEQ ID NO: 283 - protein, 3742 aa, Physcomitrella patens
MMMMMMMMPPPPPPPRRRRRRRRRRREEEEEEEEEIIIIIIIIIIIIIIIITTTTTTTLLLLLLLLQQQQQQQQQVVVVVVVGGGGQQQQQQQQQCCCCCCGGGGNNNNNNNNQQQQQQQQQIIIIIIIIGGGGMMMMMMMMEEEEEEEEEFFFFFFFFFFFWWWWWWWWWWWWWWKKKKKKKKKQQQQQQQQQLLLLLLLLCCCCCCLLLLLLLLEEEEEEEEEHHHHHHHHHHGGGGIIIIIIIISSSSSSKKKKKKKKKDDDDDDDDGGGGIIIIIIIILLLLLLLLEEEEEEEEEDDDDDDDDFFFFFFFFFFFAAAAATTTTTTTQQQQQQQQQGGGGGGGGDDDDDDDDRRRRRRRRRRRKKKKKKKKKDDDDDDDDVVVVVVVFFFFFFFFFFFFFFFFFFFFFFYYYYYYYYYYYYQQQQQQQQQAAAAADDDDDDDDDDDDDDDDEEEEEEEEEHHHHHHHHHHYYYYYYYYYYYYIIIIIIIIPPPPPPPRRRRRRRRRRRAAAAALLLLLLLLLLLLLLLLIIIIIIIIDDDDDDDDLLLLLLLLEEEEEEEEEPPPPPPPRRRRRRRRRRRVVVVVVVIIIIIIIINNNNNNNNSSSSSSIIIIIIIIQQQQQQQQQNNNNNNNNSSSSSSEEEEEEEEEYYYYYYYYYYYYRRRRRRRRRRRNNNNNNNNLLLLLLLLYYYYYYYYYYYYNNNNNNNNHHHHHHHHHHEEEEEEEEENNNNNNNNVVVVVVVFFFFFFFFFFFVVVVVVVAAAAADDDDDDDDHHHHHHHHHHGGGGGGGGGGGGAAAAAGGGGNNNNNNNNNNNNNNNNWWWWWWWWWWWWWWAAAAASSSSSSGGGGYYYYYYYYYYYYHHHHHHHHHHQQQQQQQQQGGGGEEEEEEEEEQQQQQQQQQVVVVVVVEEEEEEEEEEEEEEEEEEDDDDDDDDIIIIIIIIMMMMMMMMDDDDDDDDMMMMMMMMIIIIIIIIDDDDDDDDRRRRRRRRRRREEEEEEEEEAAAAADDDDDDDDGGGGSSSSSSDDDDDDDDSSSSSSLLLLLLLLEEEEEEEEEGGGGFFFFFFFFFFFVVVVVVVLLLLLLLLCCCCCCHHHHHHHHHHSSSSSSIIIIIIIIAAAAAGGGGGGGGTTTTTTTGGGGSSSSSSGGGGMMMMMMMMGGGGSSSSSSYYYYYYYYYYYYLLLLLLLLLLLLLLLLEEEEEEEEEAAAAALLLLLLLLNNNNNNNNDDDDDDDDRRRRRRRRRRRYYYYYYYYYYYYSSSSSSKKKKKKKKKKKKKKKKKKLLLLLLLLVVVVVVVQQQQQQQQQTTTTTTTYYYYYYYYYYYYSSSSSSVVVVVVVFFFFFFFFFFFPPPPPPPNNNNNNNNQQQQQQQQQMMMMMMMMEEEEEEEEETTTTTTTSSSSSSDDDDDDDDVVVVVVVVVVVVVVVVVVVVVQQQQQQQQQPPPPPPPYYYYYYYYYYYYNNNNNNNNSSSSSSLLLLLLLLLLLLLLLLTTTTTTTLLLLLLLLKKKKKKKKKRRRRRRRRRRRLLLLLLLLTTTTTTTLLLLLLLLNNNNNNNNAAAAADDDDDDDDCCCCCCVVVVVVVVVVVVVVVVVVVVVLLLLLLLLDDDDDDDDNNNNNNNNTTTTTTTAAAAALLLLLLLLNNNNNNNNRRRRRRRRRRRIIIIIIIIAAAAAVVVVVVVDDDDDDDDRRRRRRRRRRRLLLLLLLLHHHHHHHHHHIIIIIIIIPPPPPPPNNNNNNNNPPPPPPPTTTTTTTFFFFFFFFFFFAAAAAQQQQQQQQQTTTTTTTNNNNNNNNSSSSSSLLLLLLLLVVVVVVVSSSSSSTTTTTTTVVVVVVVMMMMMMMMSSSSSSAAAAASSSSSSTTTTTTTTTTTTTTTTTTTTTLLLLLLLLRRRRRRRRRRRYYYYYYYYYYYYPPPPPPPGGGGYYYYYYYYYYYYMMMMMMMMNNNNNNNNNNNNNNNNDDDDDDDDLLLLLLLLVVVVVVVGGGGLLLLLLLLVVVVVVVAAAAASSSSSSLLLLLLLLIIIIIIIIPPPPPPPTTTTTTTPPPPPPPRRRRRRRRRRRCCCCCCHHHHHHHHHHFFFFFFFFFFFLLLLLLLLMMMMMMMMTTTTTTTGGGGYYYYYYYYYYYYTTTTTTTPPPPPPPLLLLLLLLTTTTTTTVVVVVVVEEEEEEEEERRRRRRRRRRRQQQQQQQQQAAAAANNNNNNNNAAAAAIIIIIIIIRRRRRRRRRRRKKKKKKKKKTTTTTTTTTTTTTTVVVVVVVLLLLLLLLDDDDDDDDVVVVVVVMMMMMMMMRRRRRRRRRRRRRRRRRRRRRRLLLLLLLLLLLLLLLLQQQQQQQQQAAAAAKKKKKKKKKNNNNNNNNIIIIIIIIMMMMMMMMVVVVVVVSSSSSSSSSSSSYYYYYYYYYYYYAAAAARRRRRRRRRRRTTTTTTTKKKKKKKKKEEEEEEEEEAAAAASSSSSSQQQQQQQQQAAAAAKKKKKKKKKYYYYYYYYYYYYIIIIIIIISSSSSSIIIIIIIILLLLLLLLNNNNNNNNIIIIIIIIIIIIIIIIQQQQQQQQQGGGGEEEEEEEEEVVVVVVVDDDDDDDDPPPPPPPTTTTTTTQQQQQQQQQVVVVVVVHHHHHHHHHHKKKKKKKKKSSSSSSLLLLLLLLQQQQQQQQQRRRRRRRRRRRIIIIIIIIRRRRRRRRRRREEEEEEEEERRRRRRRRRRRKKKKKKKKKLLLLLLLLAAAAANNNNNNNNFFFFFFFFFFFIIIIIIIIEEEEEEEEEWWWWWWWWWWWWWWGGGGPPPPPPPAAAAASSSSSSIIIIIIIIQQQQQQQQQVVVVVVVAAAAALLLLLLLLSSSSSSRRRRRRRRRRRKKKKKKKKKSSSSSSPPPPPPPYYYYYYYYYYYYVVVVVVVQQQQQQQQQTTTTTTTAAAAAHHHHHHHHHHRRRRRRRRRRRVVVVVVVSSSSSSGGGGLLLLLLLLMMMMMMMMLLLLLLLLAAAAASSSSSSHHHHHHHHHHTTTTTTTSSSSSSIIIIIIIIRRRRRRRRRRRHHHHHHHHHHLLLLLLLLFFFFFFFFFFFSSSSSSKKKKKKKKKCCCCCCIIIIIIIISSSSSSQQQQQQQQQYYYYYYYYYYYYEEEEEEEEEKKKKKKKKKLLLLLLLLRRRRRRRRRRRKKKKKKKKKKKKKKKKKKQQQQQQQQQAAAAAFFFFFFFFFFFLLLLLLLLDDDDDDDDNNNNNNNNYYYYYYYYYYYYRRRRRRRRRRRKKKKKKKKKFFFFFFFFFFFPPPPPPPMMMMMMMMFFFFFFFFFFFAAAAADDDDDDDDNNNNNNNNDDDDDDDDLLLLLLLLSSSSSSEEEEEEEEEFFFFFFFFFFFDDDDDDDDEEEEEEEEESSSSSSRRRRRRRRRRREEEEEEEEEIIIIIIIIVVVVVVVQQQQQQQQQNNNNNNNNLLLLLLLLVVVVVVVDDDDDDDDEEEEEEEEEYYYYYYYYYYYYKKKKKKKKKAAAAACCCCCCEEEEEEEEESSSSSSAAAAADDDDDDDDYYYYYYYYYYYYIIIIIIIIKKKKKKKKKWWWWWWWWWWWWWWGGGGMMMMMMMMEEEEEEEEEDDDDDDDDRRRRRRRRRRRGGGGKKKKKKKKKQQQQQQQQQVVVVVVVSSSSSSGGGGEEEEEEEEEGGGGNNNNNNNNTTTTTTTSSSSSSGGGGTTTTTTTVVVVVVVDDDDDDDDSSSSSSRRRRRRRRRRRVVVVVVVGGGGAAAAASSSSSSS

SEQ ID NO: 284 - protein, 3617 aa, Plasmodium falciparum
MMMMMMMMPPPPPPPRRRRRRRRRRREEEEEEEEEIIIIIIIIIIIIIIIITTTTTTTLLLLLLLLQQQQQQQQQCCCCCCGGGGQQQQQQQQQCCCCCCGGGGNNNNNNNNQQQQQQQQQIIIIIIIIGGGGVVVVVVVEEEEEEEEEFFFFFFFFFFFWWWWWWWWWWWWWWKKKKKKKKKQQQQQQQQQLLLLLLLLCCCCCCNNNNNNNNEEEEEEEEEHHHHHHHHHHNNNNNNNNIIIIIIIIDDDDDDDDQQQQQQQQQEEEEEEEEEGGGGIIIIIIIILLLLLLLLKKKKKKKKKNNNNNNNNNNNNNNNNNNNNNNNNFFFFFFFFFFFLLLLLLLLNNNNNNNNEEEEEEEEEDDDDDDDDRRRRRRRRRRRKKKKKKKKKDDDDDDDDIIIIIIIIFFFFFFFFFFFFFFFFFFFFFFYYYYYYYYYYYYQQQQQQQQQAAAAADDDDDDDDDDDDDDDDEEEEEEEEEHHHHHHHHHHFFFFFFFFFFFIIIIIIIIPPPPPPPGGGGAAAAALLLLLLLLLLLLLLLLFFFFFFFFFFFDDDDDDDDLLLLLLLLEEEEEEEEEPPPPPPPRRRRRRRRRRRVVVVVVVIIIIIIIINNNNNNNNSSSSSSIIIIIIIIQQQQQQQQQTTTTTTTSSSSSSEEEEEEEEEYYYYYYYYYYYYRRRRRRRRRRRNNNNNNNNLLLLLLLLYYYYYYYYYYYYNNNNNNNNPPPPPPPEEEEEEEEENNNNNNNNMMMMMMMMFFFFFFFFFFFIIIIIIIISSSSSSKKKKKKKKKEEEEEEEEEGGGGGGGGGGGGAAAAAGGGGNNNNNNNNNNNNNNNNWWWWWWWWWWWWWWGGGGCCCCCCGGGGYYYYYYYYYYYYSSSSSSQQQQQQQQQGGGGHHHHHHHHHHKKKKKKKKKVVVVVVVEEEEEEEEEEEEEEEEEEEEEEEEEEEIIIIIIIIIIIIIIIIDDDDDDDDMMMMMMMMIIIIIIIIDDDDDDDDRRRRRRRRRRREEEEEEEEEVVVVVVVDDDDDDDDNNNNNNNNSSSSSSDDDDDDDDNNNNNNNNLLLLLLLLEEEEEEEEEGGGGFFFFFFFFFFFIIIIIIIILLLLLLLLSSSSSSHHHHHHHHHHSSSSSSIIIIIIIIAAAAAGGGGGGGGTTTTTTTGGGGSSSSSSGGGGMMMMMMMMGGGGSSSSSSYYYYYYYYYYYYLLLLLLLLLLLLLLLLEEEEEEEEELLLLLLLLLLLLLLLLNNNNNNNNDDDDDDDDNNNNNNNNYYYYYYYYYYYYSSSSSSKKKKKKKKKKKKKKKKKKMMMMMMMMIIIIIIIIQQQQQQQQQTTTTTTTFFFFFFFFFFFSSSSSSVVVVVVVFFFFFFFFFFFPPPPPPPLLLLLLLLLLLLLLLLTTTTTTTNNNNNNNNEEEEEEEEESSSSSSSSSSSSDDDDDDDDVVVVVVVVVVVVVVVVVVVVVQQQQQQQQQPPPPPPPYYYYYYYYYYYYNNNNNNNNSSSSSSIIIIIIIILLLLLLLLTTTTTTTLLLLLLLLKKKKKKKKKRRRRRRRRRRRLLLLLLLLIIIIIIIILLLLLLLLSSSSSSTTTTTTTDDDDDDDDSSSSSSVVVVVVVVVVVVVVVVVVVVVIIIIIIIIDDDDDDDDNNNNNNNNTTTTTTTSSSSSSLLLLLLLLNNNNNNNNRRRRRRRRRRRIIIIIIIIFFFFFFFFFFFVVVVVVVEEEEEEEEERRRRRRRRRRRLLLLLLLLKKKKKKKKKLLLLLLLLNNNNNNNNNNNNNNNNPPPPPPPTTTTTTTFFFFFFFFFFFQQQQQQQQQQQQQQQQQQTTTTTTTNNNNNNNNTTTTTTTIIIIIIIIIIIIIIIISSSSSSNNNNNNNNVVVVVVVMMMMMMMMSSSSSSAAAAASSSSSSTTTTTTTTTTTTTTTTTTTTTLLLLLLLLRRRRRRRRRRRYYYYYYYYYYYYPPPPPPPGGGGSSSSSSMMMMMMMMNNNNNNNNNNNNNNNNDDDDDDDDMMMMMMMMIIIIIIIISSSSSSLLLLLLLLIIIIIIIISSSSSSSSSSSSLLLLLLLLIIIIIIIIIIIIIIIINNNNNNNNPPPPPPPKKKKKKKKKCCCCCCHHHHHHHHHHFFFFFFFFFFFLLLLLLLLIIIIIIIITTTTTTTSSSSSSYYYYYYYYYYYYTTTTTTTPPPPPPPIIIIIIIITTTTTTTIIIIIIIIDDDDDDDDKKKKKKKKKHHHHHHHHHHIIIIIIIISSSSSSNNNNNNNNVVVVVVVQQQQQQQQQKKKKKKKKKTTTTTTTTTTTTTTVVVVVVVLLLLLLLLDDDDDDDDVVVVVVVMMMMMMMMKKKKKKKKKRRRRRRRRRRRLLLLLLLLLLLLLLLLHHHHHHHHHHTTTTTTTKKKKKKKKKNNNNNNNNIIIIIIIIMMMMMMMMVVVVVVVSSSSSSAAAAAPPPPPPPVVVVVVVRRRRRRRRRRRRRRRRRRRRRRGGGGMMMMMMMMYYYYYYYYYYYYIIIIIIIISSSSSSIIIIIIIILLLLLLLLNNNNNNNNIIIIIIIIIIIIIIIIRRRRRRRRRRRGGGGEEEEEEEEETTTTTTTDDDDDDDDPPPPPPPTTTTTTTQQQQQQQQQVVVVVVVHHHHHHHHHHKKKKKKKKKGGGGLLLLLLLLQQQQQQQQQRRRRRRRRRRRIIIIIIIIRRRRRRRRRRRDDDDDDDDRRRRRRRRRRRKKKKKKKKKLLLLLLLLVVVVVVVNNNNNNNNFFFFFFFFFFFIIIIIIIIKKKKKKKKKWWWWWWWWWWWWWWNNNNNNNNPPPPPPPAAAAASSSSSSIIIIIIIIQQQQQQQQQVVVVVVVTTTTTTTLLLLLLLLAAAAAKKKKKKKKKQQQQQQQQQSSSSSSPPPPPPPHHHHHHHHHHVVVVVVVVVVVVVVSSSSSSQQQQQQQQQHHHHHHHHHHKKKKKKKKKVVVVVVVCCCCCCGGGGLLLLLLLLMMMMMMMMMMMMMMMMAAAAANNNNNNNNHHHHHHHHHHTTTTTTTSSSSSSIIIIIIIISSSSSSTTTTTTTLLLLLLLLFFFFFFFFFFFEEEEEEEEERRRRRRRRRRRCCCCCCVVVVVVVTTTTTTTQQQQQQQQQFFFFFFFFFFFDDDDDDDDRRRRRRRRRRRLLLLLLLLYYYYYYYYYYYYKKKKKKKKKRRRRRRRRRRRRRRRRRRRRRRAAAAAFFFFFFFFFFFLLLLLLLLEEEEEEEEENNNNNNNNYYYYYYYYYYYYKKKKKKKKKKKKKKKKKKEEEEEEEEESSSSSSMMMMMMMMFFFFFFFFFFFSSSSSSSSSSSSAAAAADDDDDDDDGGGGQQQQQQQQQGGGGNNNNNNNNFFFFFFFFFFFEEEEEEEEEEEEEEEEEEMMMMMMMMEEEEEEEEESSSSSSSSSSSSKKKKKKKKKEEEEEEEEEIIIIIIIITTTTTTTQQQQQQQQQNNNNNNNNLLLLLLLLIIIIIIIIDDDDDDDDEEEEEEEEEYYYYYYYYYYYYKKKKKKKKKSSSSSSAAAAAEEEEEEEEERRRRRRRRRRRDDDDDDDDDDDDDDDDYYYYYYYYYYYYFFFFFFFFFFFTTTTTTTNNNNNNNNTTTTTTTYYYYYYYYYYYYIIIIIIIII

SEQ ID NO: 285 - protein, 3769 aa, Reticulomyxa filosa
MMMMMMMMPPPPPPPRRRRRRRRRRREEEEEEEEEIIIIIIIIIIIIIIIITTTTTTTLLLLLLLLQQQQQQQQQVVVVVVVGGGGQQQQQQQQQCCCCCCGGGGNNNNNNNNQQQQQQQQQIIIIIIIIGGGGTTTTTTTEEEEEEEEEFFFFFFFFFFFWWWWWWWWWWWWWWGGGGRRRRRRRRRRRLLLLLLLLIIIIIIIIAAAAAEEEEEEEEEHHHHHHHHHHGGGGIIIIIIIIGGGGPPPPPPPDDDDDDDDGGGGIIIIIIIIVVVVVVVKKKKKKKKKEEEEEEEEEFFFFFFFFFFFAAAAATTTTTTTEEEEEEEEEGGGGTTTTTTTDDDDDDDDRRRRRRRRRRRKKKKKKKKKDDDDDDDDVVVVVVVFFFFFFFFFFFFFFFFFFFFFFYYYYYYYYYYYYQQQQQQQQQAAAAADDDDDDDDDDDDDDDDQQQQQQQQQHHHHHHHHHHYYYYYYYYYYYYIIIIIIIIPPPPPPPRRRRRRRRRRRAAAAALLLLLLLLLLLLLLLLIIIIIIIIDDDDDDDDLLLLLLLLEEEEEEEEEPPPPPPPRRRRRRRRRRRVVVVVVVIIIIIIIINNNNNNNNSSSSSSLLLLLLLLQQQQQQQQQEEEEEEEEESSSSSSEEEEEEEEEFFFFFFFFFFFKKKKKKKKKNNNNNNNNLLLLLLLLWWWWWWWWWWWWWWNNNNNNNNPPPPPPPEEEEEEEEENNNNNNNNVVVVVVVYYYYYYYYYYYYIIIIIIIIDDDDDDDDSSSSSSQQQQQQQQQGGGGGGGGGGGGAAAAAGGGGNNNNNNNNNNNNNNNNWWWWWWWWWWWWWWAAAAAVVVVVVVGGGGYYYYYYYYYYYYTTTTTTTHHHHHHHHHHAAAAATTTTTTTEEEEEEEEEKKKKKKKKKYYYYYYYYYYYYEEEEEEEEEHHHHHHHHHHIIIIIIIIMMMMMMMMDDDDDDDDMMMMMMMMIIIIIIIIDDDDDDDDRRRRRRRRRRREEEEEEEEEDDDDDDDDNNNNNNNNSSSSSSDDDDDDDDSSSSSSLLLLLLLLEEEEEEEEEGGGGFFFFFFFFFFFVVVVVVVLLLLLLLLTTTTTTTHHHHHHHHHHSSSSSSIIIIIIIIAAAAAGGGGGGGGTTTTTTTGGGGSSSSSSGGGGFFFFFFFFFFFGGGGSSSSSSHHHHHHHHHHMMMMMMMMLLLLLLLLEEEEEEEEEQQQQQQQQQLLLLLLLLTTTTTTTDDDDDDDDRRRRRRRRRRRYYYYYYYYYYYYPPPPPPPKKKKKKKKKKKKKKKKKKIIIIIIIIIIIIIIIIQQQQQQQQQTTTTTTTYYYYYYYYYYYYSSSSSSVVVVVVVFFFFFFFFFFFPPPPPPPNNNNNNNNDDDDDDDDSSSSSSEEEEEEEEERRRRRRRRRRRSSSSSSSSSSSSVVVVVVVVVVVVVVVVVVVVVHHHHHHHHHHPPPPPPPYYYYYYYYYYYYNNNNNNNNSSSSSSVVVVVVVLLLLLLLLAAAAALLLLLLLLKKKKKKKKKRRRRRRRRRRRLLLLLLLLIIIIIIIILLLLLLLLNNNNNNNNAAAAADDDDDDDDAAAAAVVVVVVVVVVVVVVVVVVVVVIIIIIIIIDDDDDDDDNNNNNNNNTTTTTTTSSSSSSLLLLLLLLHHHHHHHHHHRRRRRRRRRRRIIIIIIIIAAAAADDDDDDDDEEEEEEEEERRRRRRRRRRRLLLLLLLLQQQQQQQQQLLLLLLLLDDDDDDDDFFFFFFFFFFFAAAAASSSSSSFFFFFFFFFFFKKKKKKKKKEEEEEEEEETTTTTTTNNNNNNNNSSSSSSIIIIIIIIIIIIIIIISSSSSSTTTTTTTVVVVVVVMMMMMMMMAAAAAAAAAASSSSSSTTTTTTTTTTTTTTTTTTTTTLLLLLLLLRRRRRRRRRRRYYYYYYYYYYYYPPPPPPPGGGGYYYYYYYYYYYYMMMMMMMMNNNNNNNNNNNNNNNNDDDDDDDDLLLLLLLLVVVVVVVGGGGLLLLLLLLIIIIIIIIAAAAASSSSSSLLLLLLLLVVVVVVVPPPPPPPTTTTTTTPPPPPPPRRRRRRRRRRRAAAAAHHHHHHHHHHFFFFFFFFFFFLLLLLLLLMMMMMMMMTTTTTTTSSSSSSFFFFFFFFFFFTTTTTTTPPPPPPPLLLLLLLLVVVVVVVIIIIIIIIKKKKKKKKKGGGGAAAAAQQQQQQQQQRRRRRRRRRRRRRRRRRRRRRRIIIIIIIIQQQQQQQQQKKKKKKKKKTTTTTTTSSSSSSVVVVVVVLLLLLLLLDDDDDDDDVVVVVVVMMMMMMMMRRRRRRRRRRRRRRRRRRRRRRLLLLLLLLLLLLLLLLQQQQQQQQQPPPPPPPKKKKKKKKKNNNNNNNNIIIIIIIIMMMMMMMMVVVVVVVSSSSSSCCCCCCGGGGTTTTTTTKKKKKKKKKKKKKKKKKKGGGGVVVVVVVYYYYYYYYYYYYVVVVVVVSSSSSSIIIIIIIILLLLLLLLDDDDDDDDIIIIIIIIIIIIIIIIRRRRRRRRRRRGGGGDDDDDDDDVVVVVVVDDDDDDDDPPPPPPPTTTTTTTDDDDDDDDIIIIIIIIHHHHHHHHHHKKKKKKKKKSSSSSSLLLLLLLLQQQQQQQQQRRRRRRRRRRRIIIIIIIIRRRRRRRRRRREEEEEEEEEKKKKKKKKKKKKKKKKKKIIIIIIIIVVVVVVVNNNNNNNNFFFFFFFFFFFIIIIIIIIPPPPPPPWWWWWWWWWWWWWWGGGGPPPPPPPAAAAASSSSSSIIIIIIIIQQQQQQQQQVVVVVVVAAAAALLLLLLLLSSSSSSKKKKKKKKKQQQQQQQQQSSSSSSPPPPPPPYYYYYYYYYYYYAAAAANNNNNNNNVVVVVVVPPPPPPPYYYYYYYYYYYYRRRRRRRRRRRVVVVVVVSSSSSSGGGGCCCCCCMMMMMMMMMMMMMMMMAAAAANNNNNNNNHHHHHHHHHHSSSSSSNNNNNNNNLLLLLLLLGGGGNNNNNNNNLLLLLLLLFFFFFFFFFFFAAAAARRRRRRRRRRRIIIIIIIIIIIIIIIIRRRRRRRRRRRTTTTTTTYYYYYYYYYYYYDDDDDDDDIIIIIIIILLLLLLLLRRRRRRRRRRRKKKKKKKKKRRRRRRRRRRRNNNNNNNNAAAAAFFFFFFFFFFFLLLLLLLLNNNNNNNNVVVVVVVYYYYYYYYYYYYKKKKKKKKKEEEEEEEEETTTTTTTPPPPPPPVVVVVVVFFFFFFFFFFFSSSSSSEEEEEEEEENNNNNNNNLLLLLLLLDDDDDDDDEEEEEEEEEFFFFFFFFFFFEEEEEEEEEDDDDDDDDAAAAAKKKKKKKKKEEEEEEEEETTTTTTTIIIIIIIITTTTTTTNNNNNNNNLLLLLLLLIIIIIIIIEEEEEEEEEEEEEEEEEEYYYYYYYYYYYYKKKKKKKKKAAAAAIIIIIIIIQQQQQQQQQTTTTTTTSSSSSSDDDDDDDDYYYYYYYYYYYYIIIIIIIINNNNNNNNWWWWWWWWWWWWWWGGGGMMMMMMMMKKKKKKKKKQQQQQQQQQQQQQQQQQQQQQQQQQQQSSSSSSQQQQQQQQQIIIIIIIISSSSSSQQQQQQQQQKKKKKKKKKEEEEEEEEESSSSSSSSSSSSSSSSSSLLLLLLLLAAAAANNNNNNNNEEEEEEEEENNNNNNNNGGGGNNNNNNNNGGGGAAAAANNNNNNNNNNNNNNNNKKKKKKKKKPPPPPPPGGGGKKKKKKKKKSSSSSSAAAAAMMMMMMMMAAAAALLLLLLLLL

SEQ ID NO: 286 - protein, 3531 aa, Schizosaccharomyces japonicus
MMMMMMMMGGGGRRRRRRRRRRREEEEEEEEEIIIIIIIIIIIIIIIITTTTTTTLLLLLLLLQQQQQQQQQAAAAAGGGGQQQQQQQQQCCCCCCGGGGNNNNNNNNQQQQQQQQQVVVVVVVGGGGSSSSSSQQQQQQQQQFFFFFFFFFFFWWWWWWWWWWWWWWQQQQQQQQQQQQQQQQQQLLLLLLLLCCCCCCLLLLLLLLEEEEEEEEEHHHHHHHHHHGGGGIIIIIIIICCCCCCPPPPPPPDDDDDDDDGGGGTTTTTTTLLLLLLLLEEEEEEEEEDDDDDDDDFFFFFFFFFFFAAAAATTTTTTTEEEEEEEEEGGGGLLLLLLLLDDDDDDDDRRRRRRRRRRRKKKKKKKKKDDDDDDDDVVVVVVVFFFFFFFFFFFFFFFFFFFFFFYYYYYYYYYYYYQQQQQQQQQSSSSSSDDDDDDDDDDDDDDDDTTTTTTTRRRRRRRRRRRYYYYYYYYYYYYIIIIIIIIPPPPPPPRRRRRRRRRRRAAAAAIIIIIIIILLLLLLLLLLLLLLLLDDDDDDDDLLLLLLLLEEEEEEEEEPPPPPPPRRRRRRRRRRRVVVVVVVVVVVVVVNNNNNNNNNNNNNNNNIIIIIIIILLLLLLLLSSSSSSDDDDDDDDTTTTTTTYYYYYYYYYYYYGGGGSSSSSSLLLLLLLLYYYYYYYYYYYYNNNNNNNNPPPPPPPEEEEEEEEENNNNNNNNIIIIIIIIFFFFFFFFFFFVVVVVVVAAAAATTTTTTTDDDDDDDDGGGGGGGGGGGGAAAAAGGGGNNNNNNNNNNNNNNNNWWWWWWWWWWWWWWAAAAAHHHHHHHHHHGGGGYYYYYYYYYYYYAAAAAHHHHHHHHHHAAAAAEEEEEEEEEKKKKKKKKKIIIIIIIIFFFFFFFFFFFEEEEEEEEEDDDDDDDDIIIIIIIIVVVVVVVDDDDDDDDMMMMMMMMIIIIIIIIDDDDDDDDRRRRRRRRRRREEEEEEEEEAAAAAEEEEEEEEEGGGGSSSSSSDDDDDDDDSSSSSSLLLLLLLLEEEEEEEEEGGGGFFFFFFFFFFFSSSSSSLLLLLLLLLLLLLLLLHHHHHHHHHHSSSSSSIIIIIIIIAAAAAGGGGGGGGTTTTTTTGGGGSSSSSSGGGGLLLLLLLLGGGGSSSSSSYYYYYYYYYYYYLLLLLLLLLLLLLLLLEEEEEEEEERRRRRRRRRRRLLLLLLLLNNNNNNNNDDDDDDDDRRRRRRRRRRRFFFFFFFFFFFPPPPPPPKKKKKKKKKKKKKKKKKKIIIIIIIIVVVVVVVQQQQQQQQQTTTTTTTYYYYYYYYYYYYSSSSSSVVVVVVVFFFFFFFFFFFPPPPPPPNNNNNNNNNNNNNNNNRRRRRRRRRRRSSSSSSVVVVVVVSSSSSSDDDDDDDDVVVVVVVVVVVVVVVVVVVVVQQQQQQQQQPPPPPPPYYYYYYYYYYYYNNNNNNNNSSSSSSLLLLLLLLLLLLLLLLTTTTTTTLLLLLLLLKKKKKKKKKRRRRRRRRRRRLLLLLLLLTTTTTTTLLLLLLLLNNNNNNNNAAAAADDDDDDDDAAAAAVVVVVVVVVVVVVVVVVVVVVLLLLLLLLDDDDDDDDNNNNNNNNAAAAAAAAAALLLLLLLLAAAAAHHHHHHHHHHIIIIIIIIAAAAAAAAAADDDDDDDDRRRRRRRRRRRLLLLLLLLHHHHHHHHHHIIIIIIIIQQQQQQQQQNNNNNNNNPPPPPPPTTTTTTTFFFFFFFFFFFHHHHHHHHHHQQQQQQQQQQQQQQQQQQNNNNNNNNQQQQQQQQQLLLLLLLLVVVVVVVSSSSSSTTTTTTTVVVVVVVMMMMMMMMSSSSSSAAAAASSSSSSTTTTTTTTTTTTTTTTTTTTTLLLLLLLLRRRRRRRRRRRYYYYYYYYYYYYPPPPPPPGGGGYYYYYYYYYYYYMMMMMMMMNNNNNNNNNNNNNNNNDDDDDDDDLLLLLLLLVVVVVVVSSSSSSIIIIIIIIIIIIIIIIAAAAASSSSSSLLLLLLLLIIIIIIIIPPPPPPPTTTTTTTPPPPPPPRRRRRRRRRRRCCCCCCHHHHHHHHHHFFFFFFFFFFFLLLLLLLLSSSSSSTTTTTTTSSSSSSYYYYYYYYYYYYTTTTTTTPPPPPPPFFFFFFFFFFFTTTTTTTSSSSSSQQQQQQQQQQQQQQQQQQVVVVVVVEEEEEEEEEDDDDDDDDAAAAARRRRRRRRRRRTTTTTTTIIIIIIIIRRRRRRRRRRRKKKKKKKKKTTTTTTTTTTTTTTVVVVVVVLLLLLLLLDDDDDDDDVVVVVVVMMMMMMMMRRRRRRRRRRRRRRRRRRRRRRLLLLLLLLLLLLLLLLQQQQQQQQQPPPPPPPKKKKKKKKKNNNNNNNNRRRRRRRRRRRMMMMMMMMVVVVVVVSSSSSSVVVVVVVNNNNNNNNPPPPPPPGGGGKKKKKKKKKQQQQQQQQQSSSSSSCCCCCCFFFFFFFFFFFIIIIIIIISSSSSSIIIIIIIILLLLLLLLNNNNNNNNIIIIIIIIIIIIIIIIQQQQQQQQQGGGGEEEEEEEEEAAAAADDDDDDDDPPPPPPPNNNNNNNNDDDDDDDDVVVVVVVHHHHHHHHHHKKKKKKKKKSSSSSSLLLLLLLLLLLLLLLLRRRRRRRRRRRIIIIIIIIRRRRRRRRRRREEEEEEEEERRRRRRRRRRRKKKKKKKKKLLLLLLLLAAAAATTTTTTTFFFFFFFFFFFIIIIIIIIPPPPPPPWWWWWWWWWWWWWWGGGGPPPPPPPAAAAASSSSSSIIIIIIIIQQQQQQQQQVVVVVVVAAAAALLLLLLLLSSSSSSKKKKKKKKKKKKKKKKKKSSSSSSPPPPPPPYYYYYYYYYYYYIIIIIIIIKKKKKKKKKTTTTTTTNNNNNNNNHHHHHHHHHHRRRRRRRRRRRVVVVVVVSSSSSSGGGGLLLLLLLLMMMMMMMMLLLLLLLLAAAAANNNNNNNNHHHHHHHHHHTTTTTTTSSSSSSIIIIIIIIAAAAASSSSSSLLLLLLLLFFFFFFFFFFFKKKKKKKKKRRRRRRRRRRRTTTTTTTLLLLLLLLDDDDDDDDQQQQQQQQQYYYYYYYYYYYYDDDDDDDDRRRRRRRRRRRLLLLLLLLRRRRRRRRRRRKKKKKKKKKRRRRRRRRRRRNNNNNNNNAAAAAFFFFFFFFFFFLLLLLLLLDDDDDDDDQQQQQQQQQYYYYYYYYYYYYRRRRRRRRRRRKKKKKKKKKEEEEEEEEESSSSSSIIIIIIIIFFFFFFFFFFFEEEEEEEEENNNNNNNNSSSSSSLLLLLLLLDDDDDDDDEEEEEEEEEFFFFFFFFFFFDDDDDDDDNNNNNNNNSSSSSSRRRRRRRRRRREEEEEEEEEVVVVVVVVVVVVVVAAAAADDDDDDDDLLLLLLLLIIIIIIIIRRRRRRRRRRREEEEEEEEEYYYYYYYYYYYYEEEEEEEEEAAAAACCCCCCEEEEEEEEEQQQQQQQQQPPPPPPPEEEEEEEEEYYYYYYYYYYYYLLLLLLLLSSSSSSMMMMMMMMM

SEQ ID NO: 287 - protein, 3518 aa, Schizosaccharomyces pombe
MMMMMMMMGGGGRRRRRRRRRRREEEEEEEEEIIIIIIIIIIIIIIIITTTTTTTLLLLLLLLQQQQQQQQQAAAAAGGGGQQQQQQQQQCCCCCCGGGGNNNNNNNNQQQQQQQQQIIIIIIIIGGGGSSSSSSQQQQQQQQQFFFFFFFFFFFWWWWWWWWWWWWWWQQQQQQQQQQQQQQQQQQLLLLLLLLCCCCCCLLLLLLLLEEEEEEEEEHHHHHHHHHHGGGGIIIIIIIIGGGGPPPPPPPDDDDDDDDGGGGTTTTTTTLLLLLLLLEEEEEEEEESSSSSSFFFFFFFFFFFAAAAATTTTTTTEEEEEEEEEGGGGVVVVVVVDDDDDDDDRRRRRRRRRRRKKKKKKKKKDDDDDDDDVVVVVVVFFFFFFFFFFFFFFFFFFFFFFYYYYYYYYYYYYQQQQQQQQQSSSSSSDDDDDDDDDDDDDDDDTTTTTTTRRRRRRRRRRRYYYYYYYYYYYYIIIIIIIIPPPPPPPRRRRRRRRRRRAAAAAIIIIIIIILLLLLLLLIIIIIIIIDDDDDDDDLLLLLLLLEEEEEEEEEPPPPPPPRRRRRRRRRRRVVVVVVVVVVVVVVNNNNNNNNNNNNNNNNIIIIIIIILLLLLLLLSSSSSSDDDDDDDDTTTTTTTYYYYYYYYYYYYGGGGSSSSSSLLLLLLLLYYYYYYYYYYYYNNNNNNNNPPPPPPPEEEEEEEEENNNNNNNNIIIIIIIILLLLLLLLIIIIIIIITTTTTTTKKKKKKKKKNNNNNNNNGGGGGGGGGGGGAAAAAGGGGNNNNNNNNNNNNNNNNWWWWWWWWWWWWWWAAAAANNNNNNNNGGGGYYYYYYYYYYYYSSSSSSHHHHHHHHHHAAAAAEEEEEEEEERRRRRRRRRRRIIIIIIIIFFFFFFFFFFFEEEEEEEEEDDDDDDDDIIIIIIIIMMMMMMMMDDDDDDDDMMMMMMMMIIIIIIIIDDDDDDDDRRRRRRRRRRREEEEEEEEEAAAAADDDDDDDDGGGGSSSSSSDDDDDDDDSSSSSSLLLLLLLLEEEEEEEEEGGGGFFFFFFFFFFFSSSSSSLLLLLLLLLLLLLLLLHHHHHHHHHHSSSSSSIIIIIIIIAAAAAGGGGGGGGTTTTTTTGGGGSSSSSSGGGGLLLLLLLLGGGGSSSSSSFFFFFFFFFFFLLLLLLLLLLLLLLLLEEEEEEEEERRRRRRRRRRRLLLLLLLLNNNNNNNNDDDDDDDDRRRRRRRRRRRYYYYYYYYYYYYPPPPPPPKKKKKKKKKKKKKKKKKKIIIIIIIIIIIIIIIIQQQQQQQQQTTTTTTTYYYYYYYYYYYYSSSSSSVVVVVVVFFFFFFFFFFFPPPPPPPNNNNNNNNSSSSSSQQQQQQQQQSSSSSSVVVVVVVSSSSSSDDDDDDDDVVVVVVVVVVVVVVVVVVVVVQQQQQQQQQPPPPPPPYYYYYYYYYYYYNNNNNNNNSSSSSSLLLLLLLLLLLLLLLLAAAAALLLLLLLLKKKKKKKKKRRRRRRRRRRRLLLLLLLLTTTTTTTLLLLLLLLNNNNNNNNAAAAADDDDDDDDSSSSSSVVVVVVVVVVVVVVVVVVVVVLLLLLLLLDDDDDDDDNNNNNNNNAAAAAAAAAALLLLLLLLAAAAAHHHHHHHHHHIIIIIIIIAAAAAAAAAADDDDDDDDRRRRRRRRRRRLLLLLLLLHHHHHHHHHHTTTTTTTQQQQQQQQQNNNNNNNNPPPPPPPTTTTTTTFFFFFFFFFFFHHHHHHHHHHQQQQQQQQQQQQQQQQQQNNNNNNNNQQQQQQQQQLLLLLLLLVVVVVVVSSSSSSTTTTTTTVVVVVVVMMMMMMMMSSSSSSAAAAASSSSSSTTTTTTTTTTTTTTTTTTTTTLLLLLLLLRRRRRRRRRRRYYYYYYYYYYYYPPPPPPPGGGGYYYYYYYYYYYYMMMMMMMMNNNNNNNNNNNNNNNNDDDDDDDDLLLLLLLLVVVVVVVSSSSSSIIIIIIIIIIIIIIIIAAAAASSSSSSLLLLLLLLIIIIIIIIPPPPPPPSSSSSSPPPPPPPRRRRRRRRRRRCCCCCCHHHHHHHHHHFFFFFFFFFFFLLLLLLLLLLLLLLLLTTTTTTTSSSSSSYYYYYYYYYYYYTTTTTTTPPPPPPPFFFFFFFFFFFTTTTTTTNNNNNNNNQQQQQQQQQQQQQQQQQQVVVVVVVEEEEEEEEEEEEEEEEEEAAAAAKKKKKKKKKAAAAAIIIIIIIIRRRRRRRRRRRKKKKKKKKKTTTTTTTTTTTTTTVVVVVVVLLLLLLLLDDDDDDDDVVVVVVVMMMMMMMMRRRRRRRRRRRRRRRRRRRRRRLLLLLLLLLLLLLLLLLLLLLLLLPPPPPPPKKKKKKKKKNNNNNNNNQQQQQQQQQMMMMMMMMVVVVVVVSSSSSSVVVVVVVNNNNNNNNPPPPPPPSSSSSSKKKKKKKKKKKKKKKKKKSSSSSSCCCCCCFFFFFFFFFFFIIIIIIIISSSSSSIIIIIIIILLLLLLLLDDDDDDDDIIIIIIIIIIIIIIIIQQQQQQQQQGGGGEEEEEEEEEAAAAADDDDDDDDPPPPPPPAAAAADDDDDDDDVVVVVVVHHHHHHHHHHKKKKKKKKKSSSSSSLLLLLLLLLLLLLLLLRRRRRRRRRRRIIIIIIIIRRRRRRRRRRREEEEEEEEERRRRRRRRRRRRRRRRRRRRRRYYYYYYYYYYYYAAAAASSSSSSFFFFFFFFFFFIIIIIIIIPPPPPPPWWWWWWWWWWWWWWGGGGPPPPPPPAAAAASSSSSSIIIIIIIIQQQQQQQQQVVVVVVVAAAAALLLLLLLLSSSSSSKKKKKKKKKKKKKKKKKKSSSSSSPPPPPPPYYYYYYYYYYYYIIIIIIIIKKKKKKKKKTTTTTTTNNNNNNNNHHHHHHHHHHRRRRRRRRRRRVVVVVVVSSSSSSGGGGLLLLLLLLMMMMMMMMLLLLLLLLAAAAANNNNNNNNHHHHHHHHHHTTTTTTTSSSSSSIIIIIIIIAAAAASSSSSSLLLLLLLLFFFFFFFFFFFKKKKKKKKKRRRRRRRRRRRTTTTTTTLLLLLLLLDDDDDDDDQQQQQQQQQYYYYYYYYYYYYDDDDDDDDRRRRRRRRRRRLLLLLLLLRRRRRRRRRRRKKKKKKKKKRRRRRRRRRRRNNNNNNNNAAAAAFFFFFFFFFFFLLLLLLLLEEEEEEEEEQQQQQQQQQYYYYYYYYYYYYKKKKKKKKKKKKKKKKKKEEEEEEEEEAAAAAIIIIIIIIFFFFFFFFFFFEEEEEEEEEDDDDDDDDDDDDDDDDLLLLLLLLNNNNNNNNEEEEEEEEEFFFFFFFFFFFDDDDDDDDSSSSSSSSSSSSRRRRRRRRRRRDDDDDDDDVVVVVVVVVVVVVVAAAAADDDDDDDDLLLLLLLLIIIIIIIINNNNNNNNEEEEEEEEEYYYYYYYYYYYYEEEEEEEEEAAAAACCCCCCEEEEEEEEEDDDDDDDDPPPPPPPNNNNNNNNYYYYYYYYYYYYLLLLLLLLSSSSSSLLLLLLLLL

SEQ ID NO: 288 - protein, 3697 aa, Microbotryum violaceum
MMMMMMMMPPPPPPPRRRRRRRRRRREEEEEEEEEIIIIIIIILLLLLLLLTTTTTTTVVVVVVVSSSSSSAAAAAGGGGQQQQQQQQQAAAAAGGGGNNNNNNNNQQQQQQQQQIIIIIIIIGGGGSSSSSSEEEEEEEEEFFFFFFFFFFFWWWWWWWWWWWWWWSSSSSSQQQQQQQQQLLLLLLLLCCCCCCAAAAAEEEEEEEEEHHHHHHHHHHGGGGIIIIIIIISSSSSSKKKKKKKKKEEEEEEEEEGGGGVVVVVVVLLLLLLLLEEEEEEEEEDDDDDDDDWWWWWWWWWWWWWWAAAAATTTTTTTDDDDDDDDMMMMMMMMTTTTTTTDDDDDDDDRRRRRRRRRRRKKKKKKKKKDDDDDDDDVVVVVVVFFFFFFFFFFFFFFFFFFFFFFYYYYYYYYYYYYQQQQQQQQQAAAAADDDDDDDDDDDDDDDDEEEEEEEEEHHHHHHHHHHYYYYYYYYYYYYIIIIIIIIPPPPPPPRRRRRRRRRRRAAAAAVVVVVVVMMMMMMMMIIIIIIIIDDDDDDDDLLLLLLLLEEEEEEEEEPPPPPPPRRRRRRRRRRRVVVVVVVLLLLLLLLDDDDDDDDSSSSSSIIIIIIIIKKKKKKKKKSSSSSSGGGGPPPPPPPYYYYYYYYYYYYKKKKKKKKKNNNNNNNNLLLLLLLLYYYYYYYYYYYYNNNNNNNNPPPPPPPEEEEEEEEENNNNNNNNFFFFFFFFFFFFFFFFFFFFFFYYYYYYYYYYYYDDDDDDDDPPPPPPPQQQQQQQQQGGGGGGGGGGGGAAAAAGGGGNNNNNNNNNNNNNNNNWWWWWWWWWWWWWWAAAAAKKKKKKKKKGGGGYYYYYYYYYYYYAAAAAAAAAAGGGGEEEEEEEEERRRRRRRRRRRVVVVVVVYYYYYYYYYYYYEEEEEEEEEEEEEEEEEEVVVVVVVMMMMMMMMEEEEEEEEEMMMMMMMMIIIIIIIIDDDDDDDDRRRRRRRRRRREEEEEEEEEAAAAAEEEEEEEEEGGGGSSSSSSDDDDDDDDSSSSSSLLLLLLLLEEEEEEEEEGGGGFFFFFFFFFFFMMMMMMMMLLLLLLLLLLLLLLLLHHHHHHHHHHSSSSSSIIIIIIIIAAAAAGGGGGGGGTTTTTTTGGGGSSSSSSGGGGLLLLLLLLGGGGSSSSSSYYYYYYYYYYYYLLLLLLLLLLLLLLLLEEEEEEEEERRRRRRRRRRRMMMMMMMMNNNNNNNNDDDDDDDDRRRRRRRRRRRYYYYYYYYYYYYPPPPPPPKKKKKKKKKKKKKKKKKKLLLLLLLLIIIIIIIIQQQQQQQQQTTTTTTTYYYYYYYYYYYYSSSSSSVVVVVVVFFFFFFFFFFFPPPPPPPDDDDDDDDAAAAADDDDDDDDSSSSSSGGGGDDDDDDDDVVVVVVVVVVVVVVVVVVVVVQQQQQQQQQPPPPPPPYYYYYYYYYYYYNNNNNNNNSSSSSSLLLLLLLLLLLLLLLLSSSSSSMMMMMMMMKKKKKKKKKRRRRRRRRRRRLLLLLLLLTTTTTTTNNNNNNNNHHHHHHHHHHAAAAADDDDDDDDSSSSSSVVVVVVVIIIIIIIIVVVVVVVLLLLLLLLDDDDDDDDNNNNNNNNAAAAAAAAAALLLLLLLLSSSSSSKKKKKKKKKIIIIIIIICCCCCCQQQQQQQQQDDDDDDDDRRRRRRRRRRRLLLLLLLLHHHHHHHHHHVVVVVVVQQQQQQQQQVVVVVVVAAAAASSSSSSFFFFFFFFFFFAAAAAQQQQQQQQQTTTTTTTNNNNNNNNQQQQQQQQQLLLLLLLLVVVVVVVSSSSSSTTTTTTTVVVVVVVMMMMMMMMSSSSSSAAAAASSSSSSTTTTTTTQQQQQQQQQTTTTTTTLLLLLLLLRRRRRRRRRRRYYYYYYYYYYYYPPPPPPPGGGGYYYYYYYYYYYYMMMMMMMMNNNNNNNNNNNNNNNNDDDDDDDDLLLLLLLLVVVVVVVGGGGMMMMMMMMIIIIIIIIAAAAASSSSSSLLLLLLLLIIIIIIIIPPPPPPPTTTTTTTPPPPPPPRRRRRRRRRRRCCCCCCHHHHHHHHHHFFFFFFFFFFFLLLLLLLLTTTTTTTTTTTTTTSSSSSSYYYYYYYYYYYYTTTTTTTPPPPPPPFFFFFFFFFFFTTTTTTTSSSSSSDDDDDDDDKKKKKKKKKIIIIIIIIEEEEEEEEEQQQQQQQQQAAAAAKKKKKKKKKAAAAAVVVVVVVRRRRRRRRRRRKKKKKKKKKTTTTTTTTTTTTTTVVVVVVVLLLLLLLLDDDDDDDDVVVVVVVMMMMMMMMRRRRRRRRRRRRRRRRRRRRRRLLLLLLLLLLLLLLLLQQQQQQQQQPPPPPPPKKKKKKKKKNNNNNNNNRRRRRRRRRRRLLLLLLLLVVVVVVVSSSSSSMMMMMMMMPPPPPPPTTTTTTTTTTTTTTPPPPPPPSSSSSSRRRRRRRRRRRHHHHHHHHHHAAAAACCCCCCYYYYYYYYYYYYIIIIIIIISSSSSSIIIIIIIILLLLLLLLNNNNNNNNIIIIIIIIIIIIIIIIQQQQQQQQQGGGGEEEEEEEEEVVVVVVVDDDDDDDDPPPPPPPTTTTTTTDDDDDDDDVVVVVVVHHHHHHHHHHKKKKKKKKKSSSSSSLLLLLLLLLLLLLLLLRRRRRRRRRRRIIIIIIIIRRRRRRRRRRREEEEEEEEERRRRRRRRRRRNNNNNNNNSSSSSSAAAAATTTTTTTFFFFFFFFFFFIIIIIIIIPPPPPPPWWWWWWWWWWWWWWGGGGPPPPPPPAAAAASSSSSSIIIIIIIIQQQQQQQQQVVVVVVVAAAAALLLLLLLLTTTTTTTKKKKKKKKKQQQQQQQQQSSSSSSPPPPPPPYYYYYYYYYYYYVVVVVVVQQQQQQQQQTTTTTTTTTTTTTTHHHHHHHHHHKKKKKKKKKVVVVVVVSSSSSSGGGGLLLLLLLLMMMMMMMMLLLLLLLLAAAAANNNNNNNNHHHHHHHHHHTTTTTTTNNNNNNNNIIIIIIIIAAAAASSSSSSIIIIIIIIFFFFFFFFFFFKKKKKKKKKRRRRRRRRRRRTTTTTTTVVVVVVVAAAAAQQQQQQQQQYYYYYYYYYYYYDDDDDDDDQQQQQQQQQLLLLLLLLRRRRRRRRRRRKKKKKKKKKRRRRRRRRRRRNNNNNNNNAAAAAFFFFFFFFFFFMMMMMMMMPPPPPPPQQQQQQQQQYYYYYYYYYYYYQQQQQQQQQKKKKKKKKKEEEEEEEEEAAAAAMMMMMMMMFFFFFFFFFFFEEEEEEEEEKKKKKKKKKNNNNNNNNLLLLLLLLDDDDDDDDEEEEEEEEEFFFFFFFFFFFDDDDDDDDEEEEEEEEEAAAAARRRRRRRRRRRAAAAATTTTTTTVVVVVVVQQQQQQQQQDDDDDDDDLLLLLLLLIIIIIIIIEEEEEEEEEEEEEEEEEEYYYYYYYYYYYYQQQQQQQQQAAAAACCCCCCEEEEEEEEEKKKKKKKKKAAAAADDDDDDDDYYYYYYYYYYYYIIIIIIIIDDDDDDDDYYYYYYYYYYYYGGGGAAAAAGGGGPPPPPPPGGGGYYYYYYYYYYYYVVVVVVVKKKKKKKKKGGGGEEEEEEEEEDDDDDDDDRRRRRRRRRRRRRRRRRRRRRREEEEEEEEEKKKKKKKKKGGGGRRRRRRRRRRREEEEEEEEEAAAAAVVVVVVVEEEEEEEEEGGGGG

SEQ ID NO: 289 - protein, 3603 aa, Xenopus laevis
MMMMMMMMPPPPPPPRRRRRRRRRRREEEEEEEEEIIIIIIIIIIIIIIIITTTTTTTLLLLLLLLQQQQQQQQQLLLLLLLLGGGGQQQQQQQQQCCCCCCGGGGNNNNNNNNQQQQQQQQQIIIIIIIIGGGGFFFFFFFFFFFEEEEEEEEEFFFFFFFFFFFWWWWWWWWWWWWWWKKKKKKKKKQQQQQQQQQLLLLLLLLCCCCCCAAAAAEEEEEEEEEHHHHHHHHHHGGGGIIIIIIIISSSSSSPPPPPPPEEEEEEEEEGGGGIIIIIIIIVVVVVVVEEEEEEEEEEEEEEEEEEFFFFFFFFFFFAAAAATTTTTTTEEEEEEEEEGGGGTTTTTTTDDDDDDDDRRRRRRRRRRRKKKKKKKKKDDDDDDDDVVVVVVVFFFFFFFFFFFFFFFFFFFFFFYYYYYYYYYYYYQQQQQQQQQAAAAADDDDDDDDDDDDDDDDEEEEEEEEEHHHHHHHHHHYYYYYYYYYYYYIIIIIIIIPPPPPPPRRRRRRRRRRRAAAAAVVVVVVVLLLLLLLLLLLLLLLLDDDDDDDDLLLLLLLLEEEEEEEEEPPPPPPPRRRRRRRRRRRVVVVVVVIIIIIIIIHHHHHHHHHHSSSSSSIIIIIIIILLLLLLLLNNNNNNNNSSSSSSPPPPPPPYYYYYYYYYYYYAAAAANNNNNNNNLLLLLLLLYYYYYYYYYYYYNNNNNNNNPPPPPPPEEEEEEEEENNNNNNNNIIIIIIIIYYYYYYYYYYYYLLLLLLLLSSSSSSEEEEEEEEEHHHHHHHHHHGGGGGGGGGGGGAAAAAGGGGNNNNNNNNNNNNNNNNWWWWWWWWWWWWWWAAAAASSSSSSGGGGFFFFFFFFFFFSSSSSSQQQQQQQQQGGGGEEEEEEEEEKKKKKKKKKIIIIIIIIHHHHHHHHHHEEEEEEEEEDDDDDDDDIIIIIIIIFFFFFFFFFFFDDDDDDDDIIIIIIIIIIIIIIIIDDDDDDDDRRRRRRRRRRREEEEEEEEEAAAAADDDDDDDDGGGGSSSSSSDDDDDDDDSSSSSSLLLLLLLLEEEEEEEEEGGGGFFFFFFFFFFFVVVVVVVLLLLLLLLCCCCCCHHHHHHHHHHSSSSSSIIIIIIIIAAAAAGGGGGGGGTTTTTTTGGGGSSSSSSGGGGLLLLLLLLGGGGSSSSSSYYYYYYYYYYYYLLLLLLLLLLLLLLLLEEEEEEEEERRRRRRRRRRRLLLLLLLLNNNNNNNNDDDDDDDDRRRRRRRRRRRYYYYYYYYYYYYPPPPPPPKKKKKKKKKKKKKKKKKKLLLLLLLLVVVVVVVQQQQQQQQQTTTTTTTYYYYYYYYYYYYSSSSSSVVVVVVVFFFFFFFFFFFPPPPPPPNNNNNNNNQQQQQQQQQDDDDDDDDEEEEEEEEEMMMMMMMMSSSSSSHHHHHHHHHHVVVVVVVVVVVVVVVVVVVVVQQQQQQQQQPPPPPPPYYYYYYYYYYYYNNNNNNNNSSSSSSLLLLLLLLLLLLLLLLTTTTTTTLLLLLLLLKKKKKKKKKRRRRRRRRRRRLLLLLLLLTTTTTTTQQQQQQQQQNNNNNNNNAAAAADDDDDDDDCCCCCCVVVVVVVVVVVVVVVVVVVVVLLLLLLLLDDDDDDDDNNNNNNNNTTTTTTTAAAAALLLLLLLLNNNNNNNNRRRRRRRRRRRIIIIIIIIAAAAATTTTTTTDDDDDDDDRRRRRRRRRRRLLLLLLLLHHHHHHHHHHIIIIIIIIQQQQQQQQQNNNNNNNNPPPPPPPSSSSSSFFFFFFFFFFFSSSSSSQQQQQQQQQIIIIIIIINNNNNNNNQQQQQQQQQLLLLLLLLVVVVVVVSSSSSSTTTTTTTIIIIIIIIMMMMMMMMSSSSSSAAAAASSSSSSTTTTTTTTTTTTTTTTTTTTTLLLLLLLLRRRRRRRRRRRYYYYYYYYYYYYPPPPPPPGGGGYYYYYYYYYYYYMMMMMMMMNNNNNNNNNNNNNNNNDDDDDDDDLLLLLLLLIIIIIIIIGGGGLLLLLLLLIIIIIIIIAAAAASSSSSSLLLLLLLLIIIIIIIIPPPPPPPTTTTTTTPPPPPPPRRRRRRRRRRRLLLLLLLLHHHHHHHHHHFFFFFFFFFFFLLLLLLLLMMMMMMMMTTTTTTTGGGGYYYYYYYYYYYYTTTTTTTPPPPPPPLLLLLLLLTTTTTTTTTTTTTTDDDDDDDDQQQQQQQQQSSSSSSVVVVVVVAAAAASSSSSSVVVVVVVRRRRRRRRRRRKKKKKKKKKTTTTTTTTTTTTTTVVVVVVVLLLLLLLLDDDDDDDDVVVVVVVMMMMMMMMRRRRRRRRRRRRRRRRRRRRRRLLLLLLLLLLLLLLLLQQQQQQQQQPPPPPPPKKKKKKKKKNNNNNNNNVVVVVVVMMMMMMMMVVVVVVVSSSSSSTTTTTTTGGGGRRRRRRRRRRRDDDDDDDDRRRRRRRRRRRQQQQQQQQQTTTTTTTNNNNNNNNHHHHHHHHHHCCCCCCYYYYYYYYYYYYIIIIIIIIAAAAAIIIIIIIILLLLLLLLNNNNNNNNIIIIIIIIIIIIIIIIQQQQQQQQQGGGGEEEEEEEEEVVVVVVVDDDDDDDDPPPPPPPTTTTTTTQQQQQQQQQVVVVVVVHHHHHHHHHHKKKKKKKKKSSSSSSLLLLLLLLQQQQQQQQQRRRRRRRRRRRIIIIIIIIRRRRRRRRRRREEEEEEEEERRRRRRRRRRRKKKKKKKKKLLLLLLLLAAAAANNNNNNNNFFFFFFFFFFFIIIIIIIIPPPPPPPWWWWWWWWWWWWWWGGGGPPPPPPPAAAAASSSSSSIIIIIIIIQQQQQQQQQVVVVVVVAAAAALLLLLLLLSSSSSSRRRRRRRRRRRKKKKKKKKKSSSSSSPPPPPPPYYYYYYYYYYYYLLLLLLLLPPPPPPPSSSSSSAAAAAHHHHHHHHHHRRRRRRRRRRRVVVVVVVSSSSSSGGGGLLLLLLLLMMMMMMMMMMMMMMMMAAAAANNNNNNNNHHHHHHHHHHTTTTTTTNNNNNNNNIIIIIIIISSSSSSSSSSSSLLLLLLLLFFFFFFFFFFFEEEEEEEEERRRRRRRRRRRTTTTTTTCCCCCCRRRRRRRRRRRQQQQQQQQQYYYYYYYYYYYYDDDDDDDDKKKKKKKKKLLLLLLLLRRRRRRRRRRRKKKKKKKKKRRRRRRRRRRREEEEEEEEEAAAAAFFFFFFFFFFFLLLLLLLLEEEEEEEEEQQQQQQQQQFFFFFFFFFFFRRRRRRRRRRRKKKKKKKKKEEEEEEEEEDDDDDDDDIIIIIIIIFFFFFFFFFFFKKKKKKKKKDDDDDDDDNNNNNNNNFFFFFFFFFFFDDDDDDDDEEEEEEEEELLLLLLLLDDDDDDDDNNNNNNNNSSSSSSRRRRRRRRRRREEEEEEEEEIIIIIIIIVVVVVVVQQQQQQQQQQQQQQQQQQLLLLLLLLIIIIIIIIDDDDDDDDEEEEEEEEEYYYYYYYYYYYYHHHHHHHHHHAAAAAAAAAATTTTTTTRRRRRRRRRRRPPPPPPPDDDDDDDDYYYYYYYYYYYYIIIIIIIISSSSSSWWWWWWWWWWWWWWGGGGTTTTTTTQQQQQQQQQDDDDDDDDKKKKKKKKKK

SEQ ID NO: 290 - protein, 3700 aa, Saccharomyces cerevisiae
MMMMMMMMGGGGGGGGEEEEEEEEEIIIIIIIIIIIIIIIITTTTTTTLLLLLLLLQQQQQQQQQAAAAAGGGGQQQQQQQQQCCCCCCGGGGNNNNNNNNHHHHHHHHHHVVVVVVVGGGGKKKKKKKKKFFFFFFFFFFFLLLLLLLLWWWWWWWWWWWWWWSSSSSSQQQQQQQQQLLLLLLLLAAAAAKKKKKKKKKEEEEEEEEEHHHHHHHHHHAAAAAIIIIIIIIGGGGTTTTTTTDDDDDDDDGGGGLLLLLLLLSSSSSSQQQQQQQQQLLLLLLLLPPPPPPPDDDDDDDDSSSSSSSSSSSSTTTTTTTEEEEEEEEERRRRRRRRRRRDDDDDDDDDDDDDDDDDDDDDDDDTTTTTTTKKKKKKKKKPPPPPPPFFFFFFFFFFFFFFFFFFFFFFRRRRRRRRRRREEEEEEEEENNNNNNNNSSSSSSRRRRRRRRRRRNNNNNNNNKKKKKKKKKFFFFFFFFFFFTTTTTTTPPPPPPPRRRRRRRRRRRAAAAAIIIIIIIIMMMMMMMMMMMMMMMMDDDDDDDDSSSSSSEEEEEEEEEPPPPPPPSSSSSSVVVVVVVIIIIIIIIAAAAADDDDDDDDVVVVVVVEEEEEEEEENNNNNNNNTTTTTTTFFFFFFFFFFFRRRRRRRRRRRGGGGFFFFFFFFFFFFFFFFFFFFFFDDDDDDDDPPPPPPPRRRRRRRRRRRNNNNNNNNTTTTTTTWWWWWWWWWWWWWWVVVVVVVAAAAASSSSSSDDDDDDDDGGGGAAAAASSSSSSAAAAAGGGGNNNNNNNNSSSSSSWWWWWWWWWWWWWWAAAAANNNNNNNNGGGGYYYYYYYYYYYYDDDDDDDDIIIIIIIIGGGGTTTTTTTRRRRRRRRRRRNNNNNNNNQQQQQQQQQDDDDDDDDDDDDDDDDIIIIIIIILLLLLLLLNNNNNNNNKKKKKKKKKIIIIIIIIDDDDDDDDKKKKKKKKKEEEEEEEEEIIIIIIIIDDDDDDDDSSSSSSTTTTTTTDDDDDDDDNNNNNNNNFFFFFFFFFFFEEEEEEEEEGGGGFFFFFFFFFFFQQQQQQQQQLLLLLLLLLLLLLLLLHHHHHHHHHHSSSSSSVVVVVVVAAAAAGGGGGGGGTTTTTTTGGGGSSSSSSGGGGLLLLLLLLGGGGSSSSSSNNNNNNNNLLLLLLLLLLLLLLLLEEEEEEEEEAAAAALLLLLLLLCCCCCCDDDDDDDDRRRRRRRRRRRYYYYYYYYYYYYPPPPPPPKKKKKKKKKKKKKKKKKKIIIIIIIILLLLLLLLTTTTTTTTTTTTTTYYYYYYYYYYYYSSSSSSVVVVVVVFFFFFFFFFFFPPPPPPPAAAAARRRRRRRRRRRSSSSSSSSSSSSEEEEEEEEEVVVVVVVVVVVVVVVVVVVVVQQQQQQQQQSSSSSSYYYYYYYYYYYYNNNNNNNNTTTTTTTIIIIIIIILLLLLLLLAAAAALLLLLLLLRRRRRRRRRRRRRRRRRRRRRRLLLLLLLLIIIIIIIIEEEEEEEEEDDDDDDDDSSSSSSDDDDDDDDAAAAATTTTTTTVVVVVVVVVVVVVVFFFFFFFFFFFDDDDDDDDNNNNNNNNAAAAASSSSSSLLLLLLLLLLLLLLLLNNNNNNNNIIIIIIIISSSSSSGGGGKKKKKKKKKVVVVVVVFFFFFFFFFFFRRRRRRRRRRRNNNNNNNNPPPPPPPNNNNNNNNIIIIIIIIDDDDDDDDLLLLLLLLQQQQQQQQQHHHHHHHHHHTTTTTTTNNNNNNNNQQQQQQQQQLLLLLLLLIIIIIIIISSSSSSTTTTTTTIIIIIIIIIIIIIIIISSSSSSSSSSSSVVVVVVVTTTTTTTNNNNNNNNSSSSSSIIIIIIIIRRRRRRRRRRRFFFFFFFFFFFPPPPPPPSSSSSSYYYYYYYYYYYYMMMMMMMMYYYYYYYYYYYYSSSSSSSSSSSSMMMMMMMMSSSSSSSSSSSSIIIIIIIIYYYYYYYYYYYYSSSSSSTTTTTTTLLLLLLLLIIIIIIIIPPPPPPPSSSSSSPPPPPPPEEEEEEEEELLLLLLLLHHHHHHHHHHFFFFFFFFFFFLLLLLLLLSSSSSSPPPPPPPSSSSSSFFFFFFFFFFFTTTTTTTPPPPPPPFFFFFFFFFFFTTTTTTTSSSSSSDDDDDDDDYYYYYYYYYYYYIIIIIIIIHHHHHHHHHHDDDDDDDDDDDDDDDDIIIIIIIIAAAAAHHHHHHHHHHKKKKKKKKKGGGGHHHHHHHHHHSSSSSSSSSSSSYYYYYYYYYYYYDDDDDDDDVVVVVVVMMMMMMMMLLLLLLLLDDDDDDDDLLLLLLLLLLLLLLLLDDDDDDDDPPPPPPPSSSSSSNNNNNNNNSSSSSSLLLLLLLLVVVVVVVSSSSSSTTTTTTTAAAAAMMMMMMMMNNNNNNNNNNNNNNNNPPPPPPPTTTTTTTYYYYYYYYYYYYFFFFFFFFFFFNNNNNNNNVVVVVVVYYYYYYYYYYYYNNNNNNNNTTTTTTTIIIIIIIIIIIIIIIIGGGGNNNNNNNNVVVVVVVEEEEEEEEEPPPPPPPRRRRRRRRRRRQQQQQQQQQIIIIIIIISSSSSSRRRRRRRRRRRAAAAAMMMMMMMMTTTTTTTKKKKKKKKKLLLLLLLLQQQQQQQQQQQQQQQQQQRRRRRRRRRRRIIIIIIIIKKKKKKKKKFFFFFFFFFFFPPPPPPPSSSSSSWWWWWWWWWWWWWWSSSSSSSSSSSSSSSSSSAAAAAMMMMMMMMHHHHHHHHHHVVVVVVVNNNNNNNNIIIIIIIIGGGGRRRRRRRRRRRRRRRRRRRRRRSSSSSSPPPPPPPYYYYYYYYYYYYLLLLLLLLPPPPPPPLLLLLLLLQQQQQQQQQPPPPPPPNNNNNNNNEEEEEEEEENNNNNNNNEEEEEEEEEVVVVVVVSSSSSSGGGGMMMMMMMMMMMMMMMMLLLLLLLLSSSSSSNNNNNNNNMMMMMMMMSSSSSSTTTTTTTVVVVVVVVVVVVVVNNNNNNNNVVVVVVVFFFFFFFFFFFEEEEEEEEENNNNNNNNAAAAACCCCCCNNNNNNNNTTTTTTTFFFFFFFFFFFDDDDDDDDKKKKKKKKKVVVVVVVFFFFFFFFFFFAAAAAKKKKKKKKKGGGGAAAAAFFFFFFFFFFFLLLLLLLLNNNNNNNNNNNNNNNNYYYYYYYYYYYYNNNNNNNNVVVVVVVGGGGDDDDDDDDLLLLLLLLFFFFFFFFFFFQQQQQQQQQSSSSSSMMMMMMMMQQQQQQQQQNNNNNNNNVVVVVVVQQQQQQQQQDDDDDDDDEEEEEEEEEFFFFFFFFFFFAAAAAEEEEEEEEESSSSSSRRRRRRRRRRREEEEEEEEEVVVVVVVVVVVVVVQQQQQQQQQSSSSSSLLLLLLLLMMMMMMMMEEEEEEEEEDDDDDDDDYYYYYYYYYYYYVVVVVVVAAAAAAAAAAEEEEEEEEEQQQQQQQQQDDDDDDDDSSSSSSYYYYYYYYYYYYLLLLLLLLDDDDDDDDDDDDDDDDVVVVVVVLLLLLLLLVVVVVVVDDDDDDDDDDDDDDDDEEEEEEEEENNNNNNNNMMMMMMMMVVVVVVVGGGGEEEEEEEEELLLLLLLLEEEEEEEEEEEEEEEEEEDDDDDDDDLLLLLLLLDDDDDDDDAAAAADDDDDDDDGGGGDDDDDDDDHHHHHHHHHHKKKKKKKKKLLLLLLLLVVVVVVVV

SEQ ID NO: 291 - DNA, 3495 bp, Homo sapiens
ggggcagtattctgtgttgagggaggaaaaacactcccttccaaaagcatgacaggcagaaagcagagaagggccaggactggctgagggcggggagctgggcctctggggtggacacacccttggtcacattgtgagggtagcttggttggccagtcccaccactgcagtgaccacagttgtgttgggctcacaccagtgaaccgaagctctggattctgagagtctgaggattccgtgaagatctcagacttgggctcagagcaaggatgcgtgaaattgtccatattcagattggccagtgtggcaaccagatcggagccaagttctgggagatgattggtgaggaacacgggatcgacttggctgggagcgaccgcggggcctcggccttgcagctggagagaatcagcgtgtactacaacgaagcctacggtaggaaatatgtgccccgagcagtcttggtggacctagaacctgggacgatggacagcattcgatctagcaaattaggagctctctttcaacccgacagttttgtccatggtaactctggggctggcaacaactgggccaaaggccactacacggagggagccgagctgatcgagaatgtcctagaggtggtgaggcacgagagtgagagctgtgactgcctgcagggcttccagatcgtccactccctgggcgggggcacaggctccgggatgggcactctgctcatgaacaagattagagaggagtacccggaccggatcatgaattccttcagcgtcatgccttctcccaaggtgtcggacacggtggtggagccctacaacgcggttctgtctatccaccagctgattgagaatgcagatgcctgtttctgcattgacaatgaggccctctatgacatctgcttccgtaccctgaagctgacgacacccacctatggggatctcaaccacctagtgtccttgaccatgagcggcataaccacctccctccggttcccgggtcagctcaacgcagacctgcgcaagctggcggtgaacatggtccccttcccccgcctgcacttctttatgcccggctttgccccactcacggcccagggcagccagcagtaccgagccctctccgtggccgagctcacccagcagatgttcgatgcccgcaataccatggctgcctgtgacctccgccgtggccgctacctcacagtggcctgcattttccggggcaagatgtccaccaaggaagtggaccagcaactgctctccgtgcagaccaggaacagcagctgctttgtggagtggattcccaacaacgtcaaggtggctgtctgcgacatcccgccccgggggctgagcatggccgccaccttcattggcaacaacacggccatccaagagatctttaatagggtctctgagcatttctcagccatgttcaaaaggaaagcttttgtgcactggtacaccagcgaagggatggacataaacgaatttggggaagctgaaaataacatccatgatttggtatccgagtaccaacaatttcaagatgccaaagcagttctagaggaagatgaagaggtcacggaggaggcagaaatggagccagaagataagggacattaactgtgagagaagctgtgccgcggagtcgcttacagaacagtttctcattagatgagtgtttctcctgcagcactccaaaacccactctgcactgcagcacagtgaatgatatgcactcaccattagcttcgacacagggactgagggagacaggtggggagcagctgacaggcattagggtctttgctgacatctactaaccttgaagagtttgatgttcagtgcatacttattaacttaaaaaaatagcaaatttattgtaaagtgctccctttgtttcaaagtgtttgccaggcatccagactacacgtgtggatttgcagggagccactggagttggtgttacatttttatactttagcagcactgataggcaccctggaatcctcacttggtatccgagggctactaagactctttccttaggttctttcctctgagcaaacactgactggcatcctgctttccagtgcctgccagcctccagaagagccaggtgcctgactagtacatggggagctacagagccaaggtcaatgtgagtcaacatccactagaaatatccatgttgtgtagacctgtgcatacaacatgctaactggaaaagaggaaaaaagaaaagccacagtcctctccacaaaaatacctggtccaaacaagaaaaacaaaaagacaagaaaaactaaagaactgcagtcttctgatctttatttctgaagagctagcctttaacatatatgtttatatagtttaaatttcttactactgttagatcccaggaattcattaataatcatccttggctttccttttaaaggctattttgaaatggtcttttcactttcattcagtcatcaccccccaaaatgctctgcagcctctctgctctttgagaaagggcacaccatgcgctcggcaaccattcaaatgcaggaattaagcagcaatggctgcagtgtccttctcagttatggaggacatcgtctcattagggaacttttacagttcaaattaatttctagaagttgccataaatgtttgcataatgacatagctttagcactacatgattttaatctgctcacattataacaggaccaaatacacaagagcgtaatcaaatcatctgtaacttcttaattacagtttacctatttctgacatgcagcactgccatctcttccagcaccatcagggttttaatggccctctagaattaccactgagatacactatttgatccatggataaccggtaatgggaaaatgctccgaccctcaatgcagtaaatatttacttgcaggcaactgggttctcatctcttgatttgcttttgtaatcagcaataataaaatagcaggtagatggatgacagttgctcattctgagaaacttcactcttttcacttatgcatcacgaggaaataactaaaatacataccaagagaaaaataccttgccatcggatcatcaacaagtcttctatttacaaacttcaaaaaacacaaaacaacattcatgttttaaatgctttctatttgtggttcaagaagcactagatttagtaagaaactctacctatatacttagtttgaagttagtaacttcctgagatgctaaagacttacagcctgcgattatacaaggatttacacatgctccgtctggtgctttacttcccaaacctaaaaaagcaatgaaatagatgtaaggaaggagggatttaaaccttttaaaaaacttttgctgacttatattactgtaaagatttgtttgctcaatagtaatcattaaactacaaagtaattcaattttaaatggcaaaattgctttatttcagactaaataaattccttttcttgaagcctaa

SEQ ID NO: 292 - DNA, 1356 bp, Homo sapiens
atgcgtgaaattgtccatattcagattggccagtgtggcaaccagatcggagccaagttctgggagatgattggtgaggaacacgggatcgacttggctgggagcgaccgcggggcctcggccttgcagctggagagaatcagcgtgtactacaacgaagcctacggtaggaaatatgtgccccgagcagtcttggtggacctagaacctgggacgatggacagcattcgatctagcaaattaggagctctctttcaacccgacagttttgtccatggtaactctggggctggcaacaactgggccaaaggccactacacggagggagccgagctgatcgagaatgtcctagaggtggtgaggcacgagagtgagagctgtgactgcctgcagggcttccagatcgtccactccctgggcgggggcacaggctccgggatgggcactctgctcatgaacaagattagagaggagtacccggaccggatcatgaattccttcagcgtcatgccttctcccaaggtgtcggacacggtggtggagccctacaacgcggttctgtctatccaccagctgattgagaatgcagatgcctgtttctgcattgacaatgaggccctctatgacatctgcttccgtaccctgaagctgacgacacccacctatggggatctcaaccacctagtgtccttgaccatgagcggcataaccacctccctccggttcccgggtcagctcaacgcagacctgcgcaagctggcggtgaacatggtccccttcccccgcctgcacttctttatgcccggctttgccccactcacggcccagggcagccagcagtaccgagccctctccgtggccgagctcacccagcagatgttcgatgcccgcaataccatggctgcctgtgacctccgccgtggccgctacctcacagtggcctgcattttccggggcaagatgtccaccaaggaatcggaccagcaactgctctccgtgcagaccaggaacagcagctgctttgtggagtggattcccaacaacgtcaaggtggctgtctgcgacatcccgccccgggggctgagcatggccgccaccttcattggcaacaacacggccatccaagagatctttaatagggtctctgagcatttctcagccatgttcaaaaggaaagcttttgtgcactggtacaccagcgaagggatggacataaacgaatttggggaagctgaaaataacatccatgatttggtatccgagtaccaacaatttcaagatgccaaagcagttctagaggaagatgaagaggtcacggaggaggcagaaatggagccagaagataagggacattaa

SEQ ID NO: 293 - protein, 444 aa, Cricetulus griseus
MREIVHIQAGQCGNQIGAKFWEVISDEHGIDPTGTYHGDSDLQLDRISVYYNEATGGKYVPRAILVDLEPGTMDSVRSGPFGQIFRPDNFVFGQSGAGNNWAKGHYTEGAELVDSVLDVVRKEAESCDCLQGFQLTHSLGGGTGSGMGTLLISKIREEYPDRIMNTFSVVPSPKVSDTVVEPYNATLSVHQLVENTDETYCIDNEALYDICFRTHKLTTPTYGDLNHLVSATMSGVTTCLRFPGQLNADLRKLAVNMVPFPRLHFFMPGFAPLTSRGSQQYRALTVPELTQQVFDAKNMMAACDPRHGRYLTVAAVFRGRMSMKEVDEQMLNVQNKNSSYFVEWIPNNVKTAVCDIPPRGLKMAVTFIGNSTAIQELFKRISEQFTAMFRRKAFLHWYTGEGMDQMEFTEAESNMNDLVSEYQQYQDATAEEEEDFGEEAEEEA

SEQ ID NO: 294 - protein, 444 aa, Cricetulus griseus
MREIVHIQAGQCGNQIGAKFWEVISDEHGIDPTGTYHGDSDLQLDRISVYYNEATGGKYVPRAILVDLEPGTMDSVRSGPFGQIFRPDNFVFGQSGAGNNWAKGHYTEGAELVDSVLDVVRKEAESCDCLQGFQLTHSLGGGTGSGMGTLLISKIREEYPDRIMNTFSVVPSPKVSDTVVEPYNATLSVHQLVENTDETYCIDNEALYDICFRTRKLTTPTYGDLNHLVSATMSGVTTCLRFPGQLNADLRKLAVNMVPFPRLHFFMPGFAPLTSRGSQQYRALTVPELTQQVFDAKNMMAACDPRHGRYLTVAAVFRGRMSMKEVDEQMLNVQNKNSSYFVEWIPNNVKTAVCDIPPRGLKMAVTFIGNSTAIQELFKRISEQFTAMFRRKAFLHWYTGEGMDEMEFTEAESNMNDLVSEYQQYQDATAEEEEDFGEEAEEQA

SEQ ID NO: 295 - protein, 444 aa, Cricetulus griseus
MREIVHIQAGQCGNQIGAKFWEVISDEHGIDPTGTYHGDSDLQLDRISVYYNEATGGKYVPRAILVDLEPGTMDSVRSGPFGQIFRPDNFVFGQSGAGNNWAKGHYTEGAELVDSVLDVVRKEAESCDCLQGFQLTHSLGGGTGSGMGTLLISKIREEYPDRIMNTFSVVPSPKVSDTVVEPYNATLSVHQLVENTDETYCIDNEALYDICFRTFKLTTPTYGDLNHLVSATMSGVTTCLRFPGQLNADLRKLAVNMVPFPRLHFFMPGFAPLTSRGSQQYRALTVPELTQQVFDAKNMMAACDPRHGRYLTVAAVFRGRMSMKEVDEQMLNVQNKNSSYFVEWIPNNVKTAVCDIPPRGLKMAVTFIGNSTAIQELFKRISEQFTAMFRRKAFLHWYTGEGMDEMEFTEAESNMNDLVSEYQQYQDATAEEEEDFGEEAEEEA

SEQ ID NO: 296 - protein, 444 aa, Cricetulus griseus
MREIVHIQAGQCGNQIGAKFWEVISDEHGIDPTGTYHGDSDLQLDRISVYYNEATGGKYVPRAILVDLEPGTMDSVRSGPFGQIFRPDNFVFGQSGAGNNWAKGHYTEGAELVDSVLDVVRKEAESCDCLQGFQLTHSLGGGTGSGMGTLLISKIREEYPDRIMNTFSVVPSPKVSDTVVEPYNATLSVHQLVENTDETYCIDNEALYDICFRTLKRTTPTYGDLNHLVSATMSGVTTCLRFPGQLNADLRKLAVNMVPFPRLHFFMPGFAPLTSRGSQQYRALTVPELTQQVFDAKNMMAACDPRHGRYLTVAAVFRGRMSMKQVDEQMLNVQNKNSSYFVEWIPNNVKTAVCDIPPRGLKMAVTFIGNSTAIQELFKRISEQFTAMFRRKAFLHWYTGEGMDEMEFTEAESNMNDLVSEYQQYQDATAEEEEDFGEEAEEEA

SEQ ID NO: 297 - protein, 444 aa, Cricetulus griseus
MREIVHIQAGQCGNQIGAKFWEVISDEHGIDPTGTYHGDSDLQLDRISVYYNEATGGKYVPRAILVDLEPGTMDSVRSGPFGQIFRPDNFVFGQSGAGNNWAKGHYTEGAELVDSVLDVVRKEAESCDCLQGFQLTHSLGGGTGSGMGTLLISKIREEYPDRIMNTFSVVPSPKVSDTVVEPYNATLSVHQLVENTDETYCIDNEALYDICFRTLKLTTPTYGDLNHFVSATMSGVTTCLRFPGQLNADLRKLAVNMVPFPRLHFFMPGFAPLTSRGSQQYRALTVPELTQQVFDAKNMMAACDPRHGRYLTVAAVFRGRMSMKEVDEQMLNVQNKNSSYFVEWIPNNVKTAVCDIPPRGLKMAVTFIGNSTAIQELFKRISEQFTAMFRRKAFLHWYTGEGMDEMEFTEAESNMNDLVSEYQQYQDATAEEEEDFGEEAEEEA

SEQ ID NO: 298 - protein, 444 aa, Cricetulus griseus
MREIVHIQAGQCGNQIGAKFWEVISDEHGIDPTGTYHGDSDLQLDRISVYYNEATGGKYVPRAILVDLEPGTMDSVRSGPFGQIFRPDNFVFGQSGAGNNWAKGHYTEGAELVDSVLDVVRKEAESCDCLQGFQLTHSLGGGTGSGMGTLLISKIRQEYPDRIMNTFSVVPSPKVSDTVVEPYNATLSVHQLVENTDETYCIDNEALYDICFRTLKLTTPTYGDLNHHVSATMSGVTTCLRFPGQLNADLRKLAVNMVPFPRLHFFMPGFAPLTSRGSQQYRALTVPELTQQVFDAKNMMAACDPRHGRYLTVAAVFRGRMSMKEVDEQMLNVQNKNSSYFVEWIPNNVKTAVCDIPPRGLKMAVTFIGNSTAIQELFKRISEQFTAMFRRKAFLHWYTGEGMDEMEFTEAESNMNDLVSEYQQYQDATAEEEEDFGEEAEEEA

SEQ ID NO: 299 - protein, 444 aa, Cricetulus griseus
MREIVHIQAGQCGNQIGAKFWEVISDEHGIDPTGTYHGDSDLQLDRISVYYNEATGGKYVPRAILVDLEPGTMDSVRSGPFGQIFRPDNFVFGQSGAGNNWAKGHYTEGAELVDSVLDVVRKEAESCDCLQGFQLTHSLGGGTGSGMGTLLISKIREEYPDRIMNTFSVVPSPKVSDTVVEPYNATLSVHQLVENTDETYCIDNEALYDICFRALKLTTPTYGDLNHLVSATMSGVTTCLRFPGQLNADLRKLAVNMVPFPRLHFFMPGFAPLTSRGSQQYRALTVPELTQQVFDAKNMMAACDPRHGRYLTVAAVFRGRMSMKEVDEQMLNVQNKNSSYFVEWIPNNVKTAVCDIPPRGLKMAVTFIGNSTAIQELFKRISEQFTAMFRRKAFLHWYTGEGMDEMEFTEAESNMNDLVSEYQQYQDATAEEEEDFGEEAEEEA

SEQ ID NO: 300 - protein, 444 aa, Cricetulus griseus
MREIVHIQAGQCGNQIGAKFWEVISDEHGIDPTGTYHGDSDLQLDRISVYYNEATGGKYVPRAILVDLEPGTMDSVRSGPFGQIFRPDNFVFGQSGAGNNWAKGHYTEGAELVDSVLDVVRKEAESCDCLQGFQLTHSLGGGTGSGMGTLLISKIREEYPDRIMNTFSVVPSPKVSDTVVEPYNATLSVHQLVENTDETYCIDNEALYDICFRTAKLTTPTYGDLNHLVSATMSGVTTCLRFPGQLNADLRKLAVNMVPFPRLHFFMPGFAPLTSRGSQQYRALTVPELTQQVFDAKNMMAACDPRHGRYLTVAAVFRGRMSMKEVDEQMLNVQNKNSSYFVEWIPNNVKTAVCDIPPRGLKMAVTFIGNSTAIQELFKRISEQFTAMFRRKAFLHWYTGEGMDEMEFTEAESNMNDLVSEYQQYQDATAEEEEDFGEEAEEEA

SEQ ID NO: 301 - protein, 444 aa, Cricetulus griseus
MREIVHIQAGQCGNQIGAKFWEVISDEHGIDPTGTYHGDSDLQLDRISVYYNEATGGKYVPRAILVDLEPGTMDSVRSGPFGQIFRPDNFVFGQSGAGNNWAKGHYTEGAQLVDSVLDVVRKEAESCDCLQGFQLTHSLGGGTGSGMGTLLISKIREQYPDRIMNTFSVVPSPKVSDTVVEPYNATLSVHQLVENTDQTYCIDNQALYDICFRTEKLTTPTYGDLNHLVSATMSGVTTCLRFPGQLNADLRKLAVNMVPFPRLHFFMPGFAPLTSRGSQQYRALTVPELTQQVFDAKNMMAACDPRHGRYLTVAAVFRGRMSMKEVDEQMLNVQNKNSSYFVEWIPNNVKTAVCDIPPRGLKMAVTFIGNSTAIQELFKRISQQFTAMFRRKAFLHWYTGEGMDEMEFTEAQSNMNDLVSEYQQYQDATAEEEEDFGEEAEEEA

SEQ ID NO: 302 - protein, 444 aa, Cricetulus griseus
MREIVHIQAGQCGNQIGAKFWEVISDEHGIDPTGTYHGDSDLQLDRISVYYNEATGGKYVPRAILVDLEPGTMDSVRSGPFGQIFRPDNFVFGQSGAGNNWAKGHYTEGAELVDSVLDVVRKEAESCDCLQGFQLTHSLGGGTGSGMGTLLISKIREEYPDRIMNTFSVVPSPKVSDTVVEPYNATLSVHQLVENTDETYCIDNEALYDICFRTMKLTTPTYGDLNHLVSATMSGVTTCLRFPGQLNADLRKLAVNMVPFPRLHFFMPGFAPLTSRGSQQYRALTVPELTQQVFDAKNMMAACDPRHGRYLTVAAVFRGRMSMKEVDEQMLNVQNKNSSYFVEWIPNNVKTAVCDIPPRGLKMAVTFIGNSTAIQELFKRISEQFTAMFRRKAFLHWYTGEGMDEMEFTEAESNMNDLVSEYQQYQDATAEEEEDFGEEAEEEA

SEQ ID NO: 303 - protein, 444 aa, Cricetulus griseus
MREIVHIQAGQCGNQIGAKFWEVISDEHGIDPTGTYHGDSDLQLDRISVYYNEATGGKYVPRAILVDLEPGTMDSVRSGPFGQIFRPDNFVFGQSGAGNNWAKGHYTEGAQLVDSVLDVVRKEAESCDCLQGFQLTHSLGGGTGSGMGTLLISKIREEYPDRIMNTFSVVPSPKVSDTVVEPYNATLSVHQLVENTDETYCIDNEALYDICFRTPKLTTPTYGDLNHLVSATMSGVTTCLRFPGQLNADLRKLAVNMVPFPRLHFFMPGFAPLTSRGSQQYRALTVPQLTQQVFDAKNMMAACDPRHGRYLTVAAVFRGRMSMKEVDEQMLNVQNKNSSYFVQWIPNNVKTAVCDIPPRGLKMAVTFIGNSTAIQQLFKRISQQFTAMFRRKAFLHWYTGEGMDQMQFTQAESNMNDLVSQYQQYQDATAQEQQDFGQQAQQQA

SEQ ID NO: 304 - protein, 444 aa, Cricetulus griseus
MREIVHIQAGQCGNQIGAKFWEVISDEHGIDPTGTYHGDSDLQLDRISVYYNEATGGKYVPRAILVDLEPGTMDSVRSGPFGQIFRPDNFVFGQSGAGNNWAKGHYTEGAELVDSVLDVVRKEAESCDCLQGFQLTHSLGGGTGSGMGTLLISKIREEYPDRIMNTFSVVPSPKVSDTVVEPYNATLSVHQLVENTDETYCIDNEALYDICFRTLALTTPTYGDLNHLVSATMSGVTTCLRFPGQLNADLRKLAVNMVPFPRLHFFMPGFAPLTSRGSQQYRALTVPELTQQVFDAKNMMAACDPRHGRYLTVAAVFRGRMSMKEVDEQMLNVQNKNSSYFVEWIPNNVKTAVCDIPPRGLKMAVTFIGNSTAIQELFKRISEQFTAMFRRKAFLHWYTGEGMDEMEFTEAESNMNDLVSQYQQYQDATAEEEEDFGEEAEEQA

SEQ ID NO: 305 - protein, 444 aa, Cricetulus griseus
MREIVHIQAGQCGNQIGAKFWEVISDEHGIDPTGTYHGDSDLQLDRISVYYNEATGGKYVPRAILVDLEPGTMDSVRSGPFGQIFRPDNFVFGQSGAGNNWAKGHYTEGAELVDSVLDVVRKEAESCDCLQGFQLTHSLGGGTGSGMGTLLISKIRQEYPDRIMNTFSVVPSPKVSDTVVEPYNATLSVHQLVQNTDETYCIDNQALYDICFRTLKATTPTYGDLNHLVSATMSGVTTCLRFPGQLNADLRKLAVNMVPFPRLHFFMPGFAPLTSRGSQQYRALTVPQLTQQVFDAKNMMAACDPRHGRYLTVAAVFRGRMSMKEVDEQMLNVQNKNSSYFVEWIPNNVKTAVCDIPPRGLKMAVTFIGNSTAIQELFKRISEQFTAMFRRKAFLHWYTGEGMDEMEFTEAESNMNDLVSEYQQYQDATAEEEQDFGEEAEEEA

SEQ ID NO: 306 - protein, 444 aa, Cricetulus griseus
MREIVHIQAGQCGNQIGAKFWEVISDEHGIDPTGTYHGDSDLQLDRISVYYNEATGGKYVPRAILVDLEPGTMDSVRSGPFGQIFRPDNFVFGQSGAGNNWAKGHYTEGAELVDSVLDVVRKEAESCDCLQGFQLTHSLGGGTGSGMGTLLISKIREEYPDRIMNTFSVVPSPKVSDTVVEPYNATLSVHQLVENTDETYCIDNQALYDICFRTLKLTTPTYGDLNHAVSATMSGVTTCLRFPGQLNADLRKLAVNMVPFPRLHFFMPGFAPLTSRGSQQYRALTVPELTQQVFDAKNMMAACDPRHGRYLTVAAVFRGRMSMKEVDEQMLNVQNKNSSYFVEWIPNNVKTAVCDIPPRGLKMAVTFIGNSTAIQELFKRISEQFTAMFRRKAFLHWYTGEGMDEMEFTEAESNMNDLVSEYQQYQDATAEEEEDFGEEAEEEA

SEQ ID NO: 307 - protein, 444 aa, Cricetulus griseus
MREIVHIQAGQCGNQIGAKFWEVISDEHGIDPTGTYHGDSDLQLDRISVYYNEATGGKYVPRAILVDLEPGTMDSVRSGPFGQIFRPDNFVFGQSGAGNNWAKGHYTEGAELVDSVLDVVRKEAESCDCLQGFQLTHSLGGGTGSGMGTLLISKIREEYPDRIMNTFSVVPSPKVSDTVVEPYNATLSVHQLVENTDQTYCIDNEALYDICFRTLKLTTPTYGDLNHLVSATMSGVTTCLRFPGQLNADLRKLAVNMVPFPRLHFFMPGFAPLTSRGSQQYRALTVPELTQQVFDAKNMMAACDPRHGRYLTVAAVFRGRMSMKEVDEQMLNVQNKNSSYFVEWIPNNVKTAVCDIPPRGLKMAVTFIGNSTAIQELFKRISEQFTAMFRRKAFLHWYTGEGMDEMEFTEAESNMNDLVSEYQQYQDATAEEEEDFGEEAEEEA

SEQ ID NO: 308 - protein, 444 aa, Cricetulus griseus
MREIVHIQAGQCGNQIGAKFWEVISDEHGIDPTGTYHGDSDLQLDRISVYYNEATGGKYVPRAILVDLEPGTMDSVRSGPFGQIFRPDNFVFGQSGAGNNWAKGHYTEGAELVDSVLDVVRKEAESCDCLQGFQLTHSLGGGTGSGMGTLLISKIREEYPDRIMNTFSVVPSPKVSDTVVEPYNATLSVHQLVENTDETYCIDNEALYDICFRTLKNTTPTYGDLNHLVSATMSGVTTCLRFPGQLNADLRKLAVNMVPFPRLHFFMPGFAPLTSRGSQQYRALTVPELTQQVFDAKNMMAACDPRHGRYLTVAAVFRGRMSMKEVDEQMLNVQNKNSSYFVEWIPNNVKTAVCDIPPRGLKMAVTFIGNSTAIQELFKRISEQFTAMFRRKAFLHWYTGEGMDEMEFTEAESNMNDLVSEYQQYQDATAEEEEDFGEEAEEEA

SEQ ID NO: 309 - protein, 444 aa, Cricetulus griseus; identical to SEQ ID NO: 308

SEQ ID NO: 310 - protein, 444 aa, Cricetulus griseus
MREIVHIQAGQCGNQIGAKFWEVISDEHGIDPTGTYHGDSDLQLDRISVYYNEATGGKYVPRAILVDLEPGTMDSVRSGPFGQIFRPDNFVFGQSGAGNNWAKGHYTEGAELVDSVLDVVRKQAESCDCLQGFQLTHSLGGGTGSGMGTLLISKIREEYPDRIMNTFSVVPSPKVSDTVVEPYNATLSVHQLVENTDETYCIDNEALYDICFRTLKLTTPTYGDLNHLVSATMSGVTTCLRFPGQLNADLRKLAVNMVPFPRLHFFMPGFAPLTSRGSQQYRALTVPELTQHVFDAKNMMAACDPRHGRYLTVAAVFRGRMSMKEVDEQMLNVQNKNSSYFVEWIPNNVKTAVCDIPPRGLKMAVTFIGNSTAIQELFKRISEQFTAMFRRKAFLHWYTGEGMDEMEFTEAESNMNDLVSEYQQYQDATAEEEEDFGEEAEEEA

SEQ ID NO: 311 - protein, 444 aa, Homo sapiens
MREIVHIQAGQCGNQIGAKFWEVISDEHGIDPTGTYHGDSDLQLDRISVYYNEATGGKYVPRAILVDLEPGTMDSVRSGPFGQIFRPDNFVFGQSGAGNNWAKGHYTEGAELVDSVLDVVRKEAESCDCLQGFQLTHSLGGGTGSGMGTLLISKIREEYPDRIMNTFSVVPSPKVSDTVVEPYNATLSVHQLVENTDETYCIDNEALYDICFRTLKLTTPTYGDMNHLVSATMSGVTTCLRFPGQLNADLRKLAVNMVPFPRLHFFMPGFAPLTSRGSQQYRALTVPELTQQVFDAKNMMAACDPRHGRYLTVAAVFRGRMSMKQVDEQMLNVQNKNSSYFVEWIPNNVKTAVCDIPPRGLKMAVTFIGNSTAIQELFKRISEQFTAMFRRKAFLHWYTGEGMDEMEFTEAESNMNDLVSEYQQYQDATAEEEEDFGQEAQEEA

SEQ ID NO: 312 - protein, 444 aa, Homo sapiens
MREIVHIQAGQCGNQIGAKFWEVISDEHGIDPTGTYHGDSDLQLDRISVYYNEATGGKYVPRAILVDLEPGTMDSVRSGPFGQIFRPDNFVFGQSGAGNNWAKGHYTEGAELVDSVLDVVRKEAESCDCLQGFQLTHSLGGGTGSGMGTLLISKIRQQYPDRIMNTFSVVPSPKVSDTVVEPYNATLSVHQLVENTDETYCIDNEALYDICFRTLKLTTPTYGDLNHLVSATMSGVTTCLRFPGQLNADLRKLAVNMVPFPRLHFFMPGFAPVTSRGSQQYRALTVPELTQQVFDAKNMMAACDPRHGRYLTVAAVFRGRMSMKEVDEQMLNVQNKNSSYFVEWIPNNVKTAVCDIPPRGLKMAVTFIGNSTAIQELFKRISEQFTAMFRRKAFLHWYTGEGMDEMEFTEAESNMNDLVSEYQQYQDATAEEEEDFGEEAEEEA

SEQ ID NO: 313 - protein, 444 aa, Homo sapiens
MREIVHIQAGQCGNQIGAKFWEVISDEHGIDPTGTYHGDSDLQLDRISVYYNEATGGKYVPRAILVDLEPGTMDSVRSGPFGQIFRPDNFVFGQSGAGNNWAKGHYTEGAELVDSVLDVVRKQAESCDCLQGFQLTHSLGGGTGSGMGTLLISKIRQEYPDRIMNTFSVVPSPKVSDTVVEPYNATLSVHQLVENTDETYCIDNEALYDICFRTLKLTTPTYGDLNHLVSATMSGVTTCLRFPGQLNADLRKLAVNMVPFPRLHFFMPGFAPLTSRGSQQYRALTVPELTQQVFDAKNMMAACDPRHGRYLTVAAVFRGRMSMKEVDEQMLNVQNKNSSYFVEWIPNNVKTAVCDIPPRGLKMADTFIGNSTAIQELFKRISEQFTAMFRRKAFLHWYTGEGMDEMEFTEAESNMNDLVSEYQQYQDATAEEEEDFGEEAEEEA

SEQ ID NO: 314 - DNA, 21 bp, Artificial Sequence
  Description of Artificial Sequence: Synthetic primer
ctccgtaggtgggcgtggtga

SEQ ID NO: 315 - DNA, 20 bp, Artificial Sequence
  Description of Artificial Sequence: Synthetic primer
ctccgtaggtgggcgtgcgc

SEQ ID NO: 316 - protein, 6 aa, Artificial Sequence
  Description of Artificial Sequence: Synthetic peptide
  MOD_RES (1): Asp or Glu
  MOD_RES (2): Lys or Arg
  MOD_RES (5): Lys or Arg
  MOD_RES (6): Phe, Tyr or Trp
XXRRXX

SEQ ID NO: 317 - protein, 9 aa, Artificial Sequence
  Description of Artificial Sequence: Synthetic peptide
  MOD_RES (1): Asp or Glu
  MOD_RES (2)..(5): This region may encompass 2 to 4 Arg or Lys residues
  MOD_RES (6): Gly or Ala
  MOD_RES (8): Pro or Leu
  MOD_RES (9): Gly or Ala
XXXXXXRXX

SEQ ID NO: 318 - protein, 8 aa, Artificial Sequence
  Description of Artificial Sequence: Synthetic peptide
  MOD_RES (1): Asp or Glu
  MOD_RES (2)..(4): Arg or Lys
  MOD_RES (5): Variable amino acid
  MOD_RES (6)..(7): Lys or Arg
  MOD_RES (8): Pro or Leu
XXXXXXXX

SEQ ID NO: 319 - protein, 6 aa, Artificial Sequence
  Description of Artificial Sequence: Synthetic peptide
  MOD_RES (1): Asp or Glu
  MOD_RES (2): Ser or Thr
  MOD_RES (3): Pro or Leu
  MOD_RES (6): Ser, Thr or Cys
XXXKRX

SEQ ID NO: 320 - protein, 7 aa, Artificial Sequence
  Description of Artificial Sequence: Synthetic peptide
  MOD_RES (1): Asp or Glu
  MOD_RES (3): Asn, Ile or Phe
  MOD_RES (6): Asp, Glu or Lys
  MOD_RES (7): Ser, Thr, Met, Asn or Gln
XKXRRXX

SEQ ID NO: 321 - protein, 7 aa, Artificial Sequence
  Description of Artificial Sequence: Synthetic peptide
  MOD_RES (1): Asp or Glu
  MOD_RES (4): Pro or Leu
  MOD_RES (5): Gly or Leu
  MOD_RES (7): Gly or Leu
XKKXXKX

SEQ ID NO: 322 - protein, 7 aa, Artificial Sequence
  Description of Artificial Sequence: Synthetic peptide
  MOD_RES (1): Asp or Glu
  MOD_RES (4): Met, Gln or Asn
  MOD_RES (6): Met, Gln or Asn
XKRXRXR

SEQ ID NO: 323 - protein, 7 aa, Artificial Sequence
  Description of Artificial Sequence: Synthetic peptide
  MOD_RES (1): Asp or Glu
  MOD_RES (3): Variable amino acid
  MOD_RES (7): Met, Asn or Gln
XKXRRKX

SEQ ID NO: 324 - protein, 6 aa, Artificial Sequence
  Description of Artificial Sequence: Synthetic peptide
  MOD_RES (1): Asp or Glu
  MOD_RES (6): Asp, Glu, Pro, Leu or Gln
XRKRRX

SEQ ID NO: 325 - protein, 7 aa, Artificial Sequence
  Description of Artificial Sequence: Synthetic peptide
  MOD_RES (1): Asp or Glu
  MOD_RES (3): Variable amino acid
XRXKKKK

SEQ ID NO: 326 - protein, 9 aa, Artificial Sequence
  Description of Artificial Sequence: Synthetic peptide
  MOD_RES (1): Asp or Glu
  MOD_RES (2)..(5): This region may encompass 2 to 4 Arg residues
  MOD_RES (6): Variable amino acid
  MOD_RES (9): Pro or Leu
XRRRRXRKX

SEQ ID NO: 327 - protein, 6 aa, Artificial Sequence
  Description of Artificial Sequence: Synthetic peptide
  MOD_RES (1): Glu or Asp
  MOD_RES (6): Glu or Asp
XRRRRX

SEQ ID NO: 328 - protein, 7 aa, Artificial Sequence
  Description of Artificial Sequence: Synthetic peptide
  MOD_RES (1): Gly or Ala
  MOD_RES (2): Lys or Arg
  MOD_RES (5): Variable amino acid
  MOD_RES (6): Lys or Arg
  MOD_RES (7): Gly or Ala
XXKRXXX

SEQ ID NO: 329 - protein, 7 aa, Artificial Sequence
  Description of Artificial Sequence: Synthetic peptide
  MOD_RES (1): Gly or Ala
  MOD_RES (3): Variable amino acid
  MOD_RES (7): Met, Asn or Gln
XKXKKKX

SEQ ID NO: 330 - protein, 9 aa, Artificial Sequence
  Description of Artificial Sequence: Synthetic peptide
  MOD_RES (1): Gly or Ala
  MOD_RES (3): Variable amino acid
  MOD_RES (4): Arg or Lys
  MOD_RES (5): Variable amino acid
  MOD_RES (6)..(7): Arg or Lys
  MOD_RES (8): Variable amino acid
  MOD_RES (9): Gln or Met
XRXXXXXXX

SEQ ID NO: 331 - protein, 7 aa, Artificial Sequence
  Description of Artificial Sequence: Synthetic peptide
  MOD_RES (1): Gly, Ala, Pro, Leu or Val
XRKRKKR

SEQ ID NO: 332 - protein, 30 aa, Artificial Sequence
  Description of Artificial Sequence: Synthetic peptide
  MOD_RES (1): Lys, Ala or Arg
  MOD_RES (30): Lys or Ala
XTPIQKHWRPTVLTEGPPVKIRIETGEWEX

SEQ ID NO: 333 - protein, 10 aa, Artificial Sequence
  Description of Artificial Sequence: Synthetic peptide
  MOD_RES (1): Lys or Arg
  MOD_RES (2): Asp or Glu
  MOD_RES (3): Lys or Arg
  MOD_RES (4): Asp or Glu
  MOD_RES (5)..(6): Variable amino acid
  MOD_RES (7)..(10): Lys or Arg
XXXXXXXXXX

SEQ ID NO: 334 - protein, 7 aa, Artificial Sequence
  Description of Artificial Sequence: Synthetic peptide
  MOD_RES (1)..(7): Lys or Arg
XXXXXXX

SEQ ID NO: 335 - protein, 7 aa, Artificial Sequence
  Description of Artificial Sequence: Synthetic peptide
  MOD_RES (1)..(2): Lys or Arg
  MOD_RES (3): Gln, Met or Asn
  MOD_RES (5): Arg or Lys
  MOD_RES (6): Gln, Met or Asn
XXXRXXR

SEQ ID NO: 336 - protein, 9 aa, Artificial Sequence
  Description of Artificial Sequence: Synthetic peptide
  MOD_RES (1)..(2): Lys or Arg
  MOD_RES (3): Variable amino acid
  MOD_RES (4)..(6): Lys or Arg
  MOD_RES (7): Variable amino acid
  MOD_RES (8)..(9): Lys or Arg
XXXXXXXXX

SEQ ID NO: 337 - protein, 9 aa, Artificial Sequence
  Description of Artificial Sequence: Synthetic peptide
  MOD_RES (1): Lys or Arg
  MOD_RES (4)..(5): Variable amino acid
  MOD_RES (9): Arg or Lys
XGGXXGGGX

SEQ ID NO: 338 - protein, 5 aa, Artificial Sequence
  Description of Artificial Sequence: Synthetic peptide
  MOD_RES (1): Lys or Arg
XKRKK

SEQ ID NO: 339 - protein, 16 aa, Artificial Sequence
  Description of Artificial Sequence: Synthetic peptide
  MOD_RES (1): Lys or Arg
  MOD_RES (2)..(3): Variable amino acid
  MOD_RES (7)..(14): This region may encompass 6 to 8 variable amino acid residues
  MOD_RES (16): Lys or Arg
XXXKNKXXXXXXXXKX

SEQ ID NO: 340 - protein, 9 aa, Artificial Sequence
  Description of Artificial Sequence: Synthetic peptide
  MOD_RES (1)..(3): This region may encompass 2 or 3 Lys or Arg residues
  MOD_RES (4)..(5): Variable amino acid
  MOD_RES (8): Lys or Arg
  MOD_RES (9): Gln, Leu or Met
XXXXXKRXX

SEQ ID NO: 341 - protein, 17 aa, Artificial Sequence
  Description of Artificial Sequence: Synthetic peptide
  MOD_RES (1)..(2): Lys or Arg
  MOD_RES (3): Pro or Leu
  MOD_RES (4)..(7): This region may encompass 1 to 4 variable amino acid residues
  MOD_RES (8)..(9): Lys or Arg
  MOD_RES (10)..(14): This region may encompass 1 to 5 variable amino acid residues
XXXXXXXXXXXXXXKKK

SEQ ID NO: 342 - protein, 48 aa, Artificial Sequence
  Description of Artificial Sequence: Synthetic peptide
  MOD_RES (1)..(2): Lys or Arg
  MOD_RES (3): Variable amino acid or not present
  MOD_RES (4)..(7): This region may encompass 2 to 4 Lys or Arg residues
  MOD_RES (8)..(41): This region may encompass 25 to 34 variable amino acid residues
  MOD_RES (42)..(45): This region may encompass 2 to 4 residues
  MOD_RES (46)..(47): This region may encompass 1 or 2 variable amino acid residues
XXXXXXXXXXXXXXXXXXXXXXXXXXXXXXXXXXXXXXXXXKKKKXXK

SEQ ID NO: 343 - protein, 34 aa, Artificial Sequence
  Description of Artificial Sequence: Synthetic peptide
  MOD_RES (1)..(4): Lys or Arg
  MOD_RES (5)..(28): This region may encompass 20 to 24 variable amino acid residues
  MOD_RES (29)..(32): This region may encompass 1 to 4 residues
  MOD_RES (33): Variable amino acid
XXXXXXXXXXXXXXXXXXXXXXXXXXXXKKKKXK

SEQ ID NO: 344 - protein, 8 aa, Artificial Sequence
  Description of Artificial Sequence: Synthetic peptide
  MOD_RES (1): Leu or Phe
  MOD_RES (2): Ser, Thr or Lys
  MOD_RES (3): Val, Ile, Gln or Met
  MOD_RES (4): Lys or Arg
  MOD_RES (6): Gln, Met, Val or Ile
  MOD_RES (7): Ser, Thr or Lys
XXXXRXXL

SEQ ID NO: 345 - protein, 10 aa, Artificial Sequence
  Description of Artificial Sequence: Synthetic peptide
  MOD_RES (1): Met or Ile
  MOD_RES (7): His, Glu or Gln
XVWSRDXRRK

SEQ ID NO: 346 - protein, 9 aa, Artificial Sequence
  Description of Artificial Sequence: Synthetic peptide
  MOD_RES (1): Pro or Leu
  MOD_RES (2)..(8): This region may encompass 5 to 7 Lys or Arg residues
  MOD_RES (9): Pro or Leu
XXXXXXXXX

SEQ ID NO: 347 - protein, 8 aa, Artificial Sequence
  Description of Artificial Sequence: Synthetic peptide
  MOD_RES (1)..(2): Pro or Leu
  MOD_RES (3): Variable amino acid
  MOD_RES (4): Lys or Arg
  MOD_RES (6): Asp or Glu
  MOD_RES (7): Lys or Arg
  MOD_RES (8): Gln, Ser or Thr
XXXXRXXX

SEQ ID NO: 348 - protein, 7 aa, Artificial Sequence
  Description of Artificial Sequence: Synthetic peptide
  MOD_RES (1): Pro or Leu
  MOD_RES (2)..(3): Arg or Lys
  MOD_RES (4): Asp, Glu or Pro
  MOD_RES (6): Arg or Lys
  MOD_RES (7): Phe, Tyr or Trp
XXXXRXX

SEQ ID NO: 349 - protein, 7 aa, Artificial Sequence
  Description of Artificial Sequence: Synthetic peptide
  MOD_RES (1): Pro or Leu
  MOD_RES (2)..(3): Arg or Lys
  MOD_RES (4): Lys or Arg
  MOD_RES (5): Gly, Ala, Pro or Leu
  MOD_RES (6): Arg or Lys
  MOD_RES (7): Ser, Thr, Gln or Met
XXXXXXX

SEQ ID NO: 350 - protein, 11 aa, Artificial Sequence
  Description of Artificial Sequence: Synthetic peptide
  MOD_RES (1): Pro or Leu
  MOD_RES (2)..(4): This region may encompass 2 or 3 Arg or Lys residues
  MOD_RES (6): Pro, Leu or Ile
  MOD_RES (7): Arg or Lys
  MOD_RES (8): Variable amino acid
  MOD_RES (9): Pro, Leu or Ile
  MOD_RES (10): Variable amino acid
XXXXKXXXXXK

SEQ ID NO: 351 - protein, 7 aa, Artificial Sequence
  Description of Artificial Sequence: Synthetic peptide
  MOD_RES (1): Pro or Leu
  MOD_RES (3)..(4): Variable amino acid
XKXXKRR

SEQ ID NO: 352 - protein, 6 aa, Artificial Sequence
  Description of Artificial Sequence: Synthetic peptide
  MOD_RES (1): Pro or Leu
  MOD_RES (3): Asp or Glu
  MOD_RES (5): Asp or Glu
XRXKXR

SEQ ID NO: 353 - protein, 6 aa, Artificial Sequence
  Description of Artificial Sequence: Synthetic peptide
  MOD_RES (1): Pro or Leu
  MOD_RES (6): Pro or Leu
XRKRKX

SEQ ID NO: 354 - protein, 9 aa, Artificial Sequence
  Description of Artificial Sequence: Synthetic peptide
  MOD_RES (1): Pro or Leu
  MOD_RES (2)..(3): Variable amino acid
  MOD_RES (6): Ile or Val
  MOD_RES (8): Pro or Leu
  MOD_RES (9): Asp or Glu
XXXKRXKXX

SEQ ID NO: 355 - protein, 10 aa, Artificial Sequence
  Description of Artificial Sequence: Synthetic peptide
  MOD_RES (1): Pro, Leu or Gln
  MOD_RES (2): Lys or Arg
  MOD_RES (3)..(6): This region may encompass 3 or 4 variable amino acid residues
XXXXXXKKRK

SEQ ID NO: 356 - protein, 21 aa, Artificial Sequence
  Description of Artificial Sequence: Synthetic peptide
  MOD_RES (1): Pro, Leu or Gln
  MOD_RES (3): Arg or Lys
  MOD_RES (4)..(5): This region may encompass 1 or 2 variable amino acid residues
  MOD_RES (6): Arg or Lys
  MOD_RES (7)..(12): This region may encompass 3 to 6 variable amino acid residues
  MOD_RES (13)..(14): Arg or Lys
  MOD_RES (15)..(16): This region may encompass 1 or 2 variable amino acid residues
  MOD_RES (17): Arg or Lys
  MOD_RES (18)..(19): This region may encompass 1 or 2 variable amino acid residues
  MOD_RES (20)..(21): Arg or Lys
XKXXXXXXXXXXXXXXXXXXX

SEQ ID NO: 357 - protein, 8 aa, Artificial Sequence
  Description of Artificial Sequence: Synthetic peptide
  MOD_RES (1): Pro, Leu, Gln, Met, Lys or Arg
  MOD_RES (3): Lys or Arg
  MOD_RES (4): Gln or Met
  MOD_RES (5): Lys or Arg
  MOD_RES (7): Variable amino acid
XRXXXRXK

SEQ ID NO: 358 - protein, 8 aa, Artificial Sequence
  Description of Artificial Sequence: Synthetic peptide
  MOD_RES (1): Pro, Leu, Gln, Met, Asn, Lys or Arg
  MOD_RES (3)..(4): Lys or Arg
  MOD_RES (6): Variable amino acid
  MOD_RES (8): Pro, Leu, Gln, Met, Asn, Lys or Arg
XKXXRXKX

SEQ ID NO: 359 - protein, 7 aa, Artificial Sequence
  Description of Artificial Sequence: Synthetic peptide
  MOD_RES (1): Pro, Leu or Val
  MOD_RES (3): Arg or Lys
  MOD_RES (4): Variable amino acid
  MOD_RES (5): Gln, Met or Asn
  MOD_RES (6): Arg or Lys
XKXXXXR

SEQ ID NO: 360 - protein, 8 aa, Artificial Sequence
  Description of Artificial Sequence: Synthetic peptide
  MOD_RES (1): Pro, Leu or Val
  MOD_RES (3): Arg or Lys
  MOD_RES (4): Variable amino acid
  MOD_RES (5)..(7): Arg or Lys
  MOD_RES (8): Pro or Leu
XKXXXXXX

SEQ ID NO: 361 - protein, 7 aa, Artificial Sequence
  Description of Artificial Sequence: Synthetic peptide
  MOD_RES (1): Pro, Leu or Val
  MOD_RES (4): Ser or Thr
  MOD_RES (6): Asp or Glu
XRKXRXK

SEQ ID NO: 362 - protein, 8 aa, Artificial Sequence
  Description of Artificial Sequence: Synthetic peptide
  MOD_RES (1): Pro, Leu, Val or Ile
  MOD_RES (2)..(6): Arg or Lys
  MOD_RES (7): Gln, Met or Asn
XXXXXXXK

SEQ ID NO: 363 - protein, 23 aa, Artificial Sequence
  Description of Artificial Sequence: Synthetic peptide
  MOD_RES (1): Gln or Leu
  MOD_RES (2)..(5): This region may encompass 2 to 4 residues
  MOD_RES (6)..(17): This region may encompass 8 to 12 variable amino acids
  MOD_RES (18): Arg or Lys
  MOD_RES (19): Gln or Leu
  MOD_RES (20): Arg or Lys
  MOD_RES (21): Gln or Leu
XKKKKXXXXXXXXXXXXXXXXKR

SEQ ID NO: 364 - protein, 9 aa, Artificial Sequence
  Description of Artificial Sequence: Synthetic peptide
  MOD_RES (1): Gln or Leu
  MOD_RES (2): Variable amino acid
  MOD_RES (5): Variable amino acid
  MOD_RES (7): Variable amino acid
XXKRXKXKK

SEQ ID NO: 365 - protein, 8 aa, Artificial Sequence
  Description of Artificial Sequence: Synthetic peptide
  MOD_RES (1): Gln, Met or Asn
  MOD_RES (3): Arg or Lys
  MOD_RES (4): Variable amino acid
  MOD_RES (6): Variable amino acid
  MOD_RES (7)..(8): Arg or Lys
XRXXKXXX

SEQ ID NO: 366 - protein, 9 aa, Artificial Sequence
  Description of Artificial Sequence: Synthetic peptide
  MOD_RES (1): Arg or Lys
  MOD_RES (2): Pro, Leu, Ile or Val
  MOD_RES (3): Lys or Arg
  MOD_RES (4)..(7): This region may encompass 2 to 4 Arg or Lys residues
  MOD_RES (8): Pro, Leu, Val or Ile
XXXXXXXXR

SEQ ID NO: 367 - protein, 12 aa, Artificial Sequence
  Description of Artificial Sequence: Synthetic peptide
  MOD_RES (1): Arg or Lys
  MOD_RES (3): Arg or Lys
  MOD_RES (4)..(6): Variable amino acid
  MOD_RES (7)..(10): This region may encompass 2 to 4 Arg or Lys residues
  MOD_RES (11): Variable amino acid
XHXXXXXXXXXR

SEQ ID NO: 368 - protein, 10 aa, Artificial Sequence
  Description of Artificial Sequence: Synthetic peptide
  MOD_RES (1): Arg or Lys
  MOD_RES (2)..(5): This region may encompass 2 to 4 residues
  MOD_RES (6): Variable amino acid
  MOD_RES (7): Arg or Lys
  MOD_RES (8): Gln or Leu
  MOD_RES (9): Arg or Lys
  MOD_RES (10): Pro or Leu
XKKKKXXXXX

SEQ ID NO: 369 - protein, 7 aa, Artificial Sequence
  Description of Artificial Sequence: Synthetic peptide
  MOD_RES (1): Arg or Lys
  MOD_RES (3): Met or Ser
  MOD_RES (5): Variable amino acid
  MOD_RES (7): Lys or Arg
XRXKXKX

SEQ ID NO: 370 - protein, 14 aa, Artificial Sequence
  Description of Artificial Sequence: Synthetic peptide
  MOD_RES (1).: Arg or Lys
  MOD_RES (2): Variable amino acid
  MOD_RES (3): Arg or Lys
  MOD_RES (4): Variable amino acid
  MOD_RES (5): Lys or Arg
  MOD_RES (6)..(11): This region may encompass 4 to 6 variable amino acid residues
XXXXXXXXXXXRKK

SEQ ID NO: 371 - protein, 24 aa, Artificial Sequence
  Description of Artificial Sequence: Synthetic peptide
  MOD_RES (1)..(4): This region may encompass 2 to 4 Arg or Lys residues
  MOD_RES (5)..(6): This region may encompass 1 or 2 variable amino acid residues
  MOD_RES (7): Arg or Lys
  MOD_RES (8)..(9): This region may encompass 0 to 2 variable amino acid residues
  MOD_RES (10): Arg or Lys
  MOD_RES (11)..(15): This region may encompass 3 to 5 variable amino acid residues
  MOD_RES (16): Arg or Lys
  MOD_RES (17)..(18): This region may encompass 0 to 2 variable amino acid residues
  MOD_RES (19): Arg or Lys
  MOD_RES (20)..(23): This region may encompass 2 to 4 Arg or Lys residues
  MOD_RES (24): Pro or Leu
XXXXXXXXXXXXXXXXXXXXXXXX

SEQ ID NO: 372 - protein, 16 aa, Artificial Sequence
  Description of Artificial Sequence: Synthetic peptide
  MOD_RES (1)..(4): This region may encompass 2 to 4 Arg or Lys residues
  MOD_RES (5)..(8): This region may encompass 2 to 4 variable amino acid residues
  MOD_RES (9): Gln, Leu or Met
  MOD_RES (10): Arg or Lys
  MOD_RES (11)..(13): This region may encompass 2 or 3 variable amino acid residues
  MOD_RES (14): Arg or Lys
XXXXXXXXXXXXXXKR

SEQ ID NO: 373 - protein, 19 aa, Artificial Sequence
  Description of Artificial Sequence: Synthetic peptide
  MOD_RES (1)..(3): Arg or Lys
  MOD_RES (4): Variable amino acid
  MOD_RES (5): Arg or Lys
  MOD_RES (6): Variable amino acid
  MOD_RES (7): Arg or Lys
  MOD_RES (8)..(16): This region may encompass 4 to 9 variable amino acid residues
  MOD_RES (17)..(19): Arg or Lys
XXXXXXXXXXXXXXXXXXX

SEQ ID NO: 374 - protein, 23 aa, Artificial Sequence
  Description of Artificial Sequence: Synthetic peptide
  MOD_RES (1)..(3): Arg or Lys
  MOD_RES (4)..(19): This region may encompass 8 to 16 variable amino acid residues
  MOD_RES (20)..(23): Arg or Lys
XXXXXXXXXXXXXXXXXXXXXXX

SEQ ID NO: 375 - protein, 12 aa, Artificial Sequence
  Description of Artificial Sequence: Synthetic peptide
  MOD_RES (1)..(4): Arg or Lys
  MOD_RES (5): Gln, Met, Asn, Pro or Leu
  MOD_RES (6): Arg or Lys
  MOD_RES (7)..(10): This region may encompass 3 or 4 variable amino acid residues
  MOD_RES (11)..(12): Arg or Lys
XXXXXXXXXXXX

SEQ ID NO: 376 - protein, 14 aa, Artificial Sequence
  Description of Artificial Sequence: Synthetic peptide
  MOD_RES (1): Ser or Thr
  MOD_RES (3)..(5): This region may encompass 1 to 3 variable amino acid residues
  MOD_RES (9)..(10): This region may encompass 1 or 2 variable amino acid residues
  MOD_RES (14: Ser or Thr
XGXXXGGGXXGGGX

SEQ ID NO: 377 - protein, 6 aa, Artificial Sequence
  Description of Artificial Sequence: Synthetic peptide
  MOD_RES (1): Ser, Thr, Gln or Met
  MOD_RES (6): Ser, Thr, Gln or Met
XRKRKX

SEQ ID NO: 378 - protein, 6 aa, Artificial Sequence
  Description of Artificial Sequence: Synthetic peptide
  MOD_RES (1): Ser, Thr, Gln or Met
  MOD_RES (6): Ser, Thr, Gln or Met
XRKRRX

SEQ ID NO: 379 - protein, 6 aa, Artificial Sequence
  Description of Artificial Sequence: Synthetic peptide
  MOD_RES (1): Ser, Thr, Gln or Met
  MOD_RES (6): Ser, Thr, Gln or Met
XRRRKX

SEQ ID NO: 380 - protein, 7 aa, Artificial Sequence
  Description of Artificial Sequence: Synthetic peptide
  MOD_RES (1): Thr or Ser
  MOD_RES (2): Arg or Lys
  MOD_RES (5): Val, Leu or Ile
  MOD_RES (7): Pro or Leu
XXKKXRX

SEQ ID NO: 381 - protein, 6 aa, Artificial Sequence
  Description of Artificial Sequence: Synthetic peptide
  MOD_RES (1): Tyr, Phe or Trp
  MOD_RES (6): Pro or Leu
XRRRRX

SEQ ID NO: 382 - protein, 11 aa, Artificial Sequence
  Description of Artificial Sequence: Synthetic peptide
APKRKSGVSKC

SEQ ID NO: 383 - protein, 8 aa, Artificial Sequence
  Description of Artificial Sequence: Synthetic peptide
APTKRKGS

SEQ ID NO: 384 - protein, 13 aa, Artificial Sequence
  Description of Artificial Sequence: Synthetic peptide
CKRKTTNADRRKA

SEQ ID NO: 385 - protein, 17 aa, Artificial Sequence
  Description of Artificial Sequence: Synthetic peptide
CYGSKNTGAKKRKIDDA

SEQ ID NO: 386 - protein, 8 aa, Artificial Sequence
  Description of Artificial Sequence: Synthetic peptide
  MOD_RES (2): Lys or Arg
  MOD_RES (3): Variable amino acid or not present
  MOD_RES (4): Gln or Leu
  MOD_RES (5)..(7): This region may encompass 2 or 3 Arg or Lys residues
DXXXXXXR

SEQ ID NO: 387 - protein, 6 aa, Artificial Sequence
  Description of Artificial Sequence: Synthetic peptide
  MOD_RES (3): Gln or Leu
  MOD_RES (6): Gln or Leu
DKXKKX

SEQ ID NO: 388 - protein, 8 aa, Artificial Sequence
  Description of Artificial Sequence: Synthetic peptide
  MOD_RES (3): Met or Asn
DRXKKKKE

SEQ ID NO: 389 - protein, 12 aa, Artificial Sequence
  Description of Artificial Sequence: Synthetic peptide
EEDGPQKKKRRL

SEQ ID NO: 390 - protein, 11 aa, Artificial Sequence
  Description of Artificial Sequence: Synthetic peptide
EYLSRKGKLEL

SEQ ID NO: 391 - protein, 21 aa, Artificial Sequence
  Description of Artificial Sequence: Synthetic peptide
  MOD_RES (4)..(6): Variable amino acid
  MOD_RES (11)..(16): Variable amino acid
GGGXXXKNRRXXXXXXRGGRN

SEQ ID NO: 392 - protein, 9 aa, Artificial Sequence
  Description of Artificial Sequence: Synthetic peptide
GKKKYKLKH

SEQ ID NO: 393 - protein, 7 aa, Artificial Sequence
  Description of Artificial Sequence: Synthetic peptide
GKKRSKA

SEQ ID NO: 394 - protein, 10 aa, Artificial Sequence
  Description of Artificial Sequence: Synthetic peptide
  MOD_RES (3)..(6): This region may encompass 2 to 4 Arg or Lys residues
  MOD_RES (7)..(8): Variable amino acid
  MOD_RES (9): Arg or Lys
  MOD_RES (10): Gln or Leu
GRXXXXXXXX

SEQ ID NO: 395 - protein, 8 aa, Artificial Sequence
  Description of Artificial Sequence: Synthetic peptide
GRKRKKRT

SEQ ID NO: 396 - protein, 11 aa, Artificial Sequence
  Description of Artificial Sequence: Synthetic peptide
  MOD_RES (1)..(4): This region may encompass 2 to 4 residues
  MOD_RES (5): Arg or Lys
  MOD_RES (6)..(8): This region may encompass 1 to 3 variable amino acid residues
GGGGXXXXGGG

SEQ ID NO: 397 - protein, 40 aa, Artificial Sequence
  Description of Artificial Sequence: Synthetic peptide
HKKKKIRTSPTFTTPKTLRLRRQPKYPRKSAPRRNKLDHY

SEQ ID NO: 398 - protein, 17 aa, Artificial Sequence
  Description of Artificial Sequence: Synthetic peptide
HRIEEKRKRTYETFKSI

SEQ ID NO: 399 - protein, 19 aa, Artificial Sequence
  Description of Artificial Sequence: Synthetic peptide
  MOD_RES (10)..(15): Variable amino acid
HRKYEAPRHXXXXXXPRKR

SEQ ID NO: 400 - protein, 10 aa, Artificial Sequence
  Description of Artificial Sequence: Synthetic peptide
IKYFKKFPKD

SEQ ID NO: 401 - protein, 7 aa, Artificial Sequence
  Description of Artificial Sequence: Synthetic peptide
  MOD_RES (2): Gly or Ala
  MOD_RES (4): Ala or Gly
  MOD_RES (7): Ala or Gly
KXKXKKX

SEQ ID NO: 402 - protein, 7 aa, Artificial Sequence
  Description of Artificial Sequence: Synthetic peptide
  MOD_RES (2): Ile, Val, Gln or Met
  MOD_RES (5): Val or Ile
  MOD_RES (6): Ser, Thr or Lys
KXRRXXL

SEQ ID NO: 403 - protein, 6 aa, Artificial Sequence
  Description of Artificial Sequence: Synthetic peptide
  MOD_RES (2)..(3): Lys or Arg
  MOD_RES (6): Lys or Arg
KXXRRX

SEQ ID NO: 404 - protein, 7 aa, Artificial Sequence
  Description of Artificial Sequence: Synthetic peptide
  MOD_RES (2): Lys or Arg
  MOD_RES (3): Gln, Met or Asn
  MOD_RES (4): Arg or Lys
  MOD_RES (6): Gln, Met or Asn
KXXXRXR

SEQ ID NO: 405 - protein, 7 aa, Artificial Sequence
  Description of Artificial Sequence: Synthetic peptide
  MOD_RES (2): Met, Asn or Gln
  MOD_RES (5): Pro, Leu, Val or Ile
  MOD_RES (7): Pro or Leu
KXRRXKX

SEQ ID NO: 406 - protein, 23 aa, Artificial Sequence
  Description of Artificial Sequence: Synthetic peptide
  MOD_RES (2): Pro or Leu
  MOD_RES (3)..(5): This region may encompass 2 or 3 residues
  MOD_RES (6)..(8): This region may encompass 1 to 3 variable amino acid residues
  MOD_RES (9)..(12): This region may encompass 2 to 4 Arg or Lys residues
  MOD_RES (13)..(21): This region may encompass 6 to 9 variable amino acid residues
  MOD_RES (23): Lys or Arg
KXKKKXXXXXXXXXXXXXXXXKX

SEQ ID NO: 407 - protein, 8 aa, Artificial Sequence
  Description of Artificial Sequence: Synthetic peptide
  MOD_RES (2): Pro or Leu
  MOD_RES (6): Variable amino acid
KXKKKXKK

SEQ ID NO: 408 - protein, 6 aa, Artificial Sequence
  Description of Artificial Sequence: Synthetic peptide
  MOD_RES (2): Pro, Leu, Met or Asn
  MOD_RES (6): Met, Asn or Gln
KXRRKX

SEQ ID NO: 409 - protein, 7 aa, Artificial Sequence
  Description of Artificial Sequence: Synthetic peptide
  MOD_RES (2)..(5): This region may encompass 2 to 4 Arg or Lys residues
  MOD_RES (6): Ser or Thr
KXXXXXH

SEQ ID NO: 410 - protein, 15 aa, Artificial Sequence
  Description of Artificial Sequence: Synthetic peptide
  MOD_RES (2)..(3): Arg or Lys
  MOD_RES (4): Gln or Leu
  MOD_RES (5)..(12): This region may encompass 3 to 8 variable amino acid residues
KXXXXXXXXXXXRRR

SEQ ID NO: 411 - protein, 30 aa, Artificial Sequence
  Description of Artificial Sequence: Synthetic peptide
  MOD_RES (2)..(6): This region may encompass 3 to 5 Arg or Lys residues
  MOD_RES (7)..(24): This region may encompass 11 to 18 variable amino acid residues
  MOD_RES (25): Arg or Lys
  MOD_RES (27)..(29): This region may encompass 2 or 3 variable amino acid residues
KXXXXXXXXXXXXXXXXXXXXXXXXKXXXK

SEQ ID NO: 412 - protein, 6 aa, Artificial Sequence
  Description of Artificial Sequence: Synthetic peptide
KAKRQR

SEQ ID NO: 413 - protein, 20 aa, Artificial Sequence
  Description of Artificial Sequence: Synthetic peptide
KDCVINKHHRNRCQYCRLQR

SEQ ID NO: 414 - protein, 6 aa, Artificial Sequence
  Description of Artificial Sequence: Synthetic peptide
KHLKGR

SEQ ID NO: 415 - protein, 7 aa, Artificial Sequence
  Description of Artificial Sequence: Synthetic peptide
KHRKHPG

SEQ ID NO: 416 - protein, 7 aa, Artificial Sequence
  Description of Artificial Sequence: Synthetic peptide
  MOD_RES (3): Met, Asn, Gln, Ser, Thr or Cys
  MOD_RES (5): Met, Asn, Gln, Ser, Thr or Cys
  MOD_RES (7): Met, Asn, Gln, Ser, Thr or Cys
KKXRXKX

SEQ ID NO: 417 - protein, 9 aa, Artificial Sequence
  Description of Artificial Sequence: Synthetic peptide
KKEKKKSKK

SEQ ID NO: 418 - protein, 5 aa, Artificial Sequence
  Description of Artificial Sequence: Synthetic peptide
RKRKK
